(19) United States
(12) Patent Application Publication
(10) Pub. No.: US 2017/0058029 A1
(43) Pub. Date: Mar. 2, 2017

(54) HUMAN ANTIBODY-PRODUCING CELL

(71) Applicant: Chiome Bioscience Inc., Tokyo (JP)

(72) Inventors: Shuichi Hashimoto, Tokyo (JP); Tomoaki Uchiki, Tokyo (JP); Shigeshisa Kawata, Tokyo (JP); Kenjiro Asagoshi, Tokyo (JP); Takashi Yabuki, Tokyo (JP); Hitomi Sano, Tokyo (JP); Shunsuke Miyai, Tokyo (JP); Naoki Takahashi, Tokyo (JP); Aki Takesue, Tokyo (JP); Atsushi Sawada, Tokyo (JP)

(21) Appl. No.: 15/308,085

(22) PCT Filed: May 1, 2015
(86) PCT No.: PCT/JP2015/063090

§ 371 Date: Oct. 31, 2016

(30) Foreign Application Priority Data
May 2, 2014 (JP) 2014-095236

(51) Int. Cl. C07K 16/28; C07K 16/24; C12N 5/0781; C07K 16/18

(52) U.S. Cl. CPC C07K 16/28; C07K 16/18; C07K 16/244; C12N 5/0635; C07K 2317/14; C07K 2317/21; C07K 2317/515; C07K 2317/51; C07K 2317/565; C12N 2510/02

(57) ABSTRACT

It is an object of the present invention to provide a chicken B cell that expresses a variety of human antibodies. The solution to the problem in the present invention is a chicken B cell, in which, in an antibody light chain gene locus thereof, all or a part of a DNA sequence derived from a human antibody light chain variable region and a human antibody light chain constant region are inserted, or the antibody light chain gene locus is replaced with all or a part of a DNA sequence derived from a human antibody light chain variable region and a human antibody light chain constant region, and in an antibody heavy chain gene locus thereof, all or a part of a DNA sequence derived from a human antibody heavy chain variable region and a human antibody heavy chain constant region are inserted, or the antibody heavy chain gene locus is replaced with all or a part of a DNA sequence derived from a human antibody heavy chain variable region and a human antibody heavy chain constant region, and in an antibody light chain pseudogene locus thereof, two or more DNA sequences derived from human antibody light chain variable regions are inserted, or the antibody light chain pseudogene locus is replaced with two or more DNA sequences derived from human antibody light chain variable regions, and/or in an antibody heavy chain pseudogene locus thereof, two or more DNA sequences derived from human antibody heavy chain variable regions are inserted, or the antibody heavy chain pseudogene locus is replaced with two or more DNA sequences derived from human antibody heavy chain variable regions.

### TECHNICAL FIELD

[0001] The present invention relates to a cell that produces a human antibody. More specifically, the present invention relates to a chicken B cell that produces a human antibody.

### BACKGROUND ART

[0002] An antibody is useful for performing identification of biological substances, the function analysis thereof, and the like, and it also plays an important role in the treatment of diseases. Such an antibody binds to a specific antigen in a living body and provokes various in vivo protective immune reactions, such as antibody-dependent cell-mediated cytotoxicity (ADCC) or complement-dependent cytotoxicity (CDC), so that the antibody recognizes a “foreign substance” to a living body and removes it. Paying attention on the ability of such an antibody, in recent years, antibody drugs have been vigorously developed. In order to treat a wide variety of diseases, it is necessary to promptly and simply supply antibodies that recognize various target antigens.

[0003] To date, as a means for preparing an antibody group comprising desired physical and physiological characteristics, a technique of producing a monoclonal antibody has been used. In a case where such a monoclonal antibody is produced, a hybridoma method comprising fusing B cells generated as a result of in vivo immunity with myelomas has been generally applied. However, this method has many problems in that, for example, immunological tolerance is produced due to the use of in vivo immunity, and it takes time and effort to finally obtain a desired antibody.

[0004] As a technique of overcoming the problem regarding immunological tolerance, a method that does not utilize in vivo immunity has been developed. This method comprises embedding a single chain valuable fragment (scFv) gene consisting of the variable regions of various antibodies into a phage particle, then allowing the phage to present a single chain antibody gene product on the surface thereof, and then obtaining a clone having an affinity for an antigen of interest from a single chain antibody library displayed by this phage. This method is referred to as a phage display method. This technique is excellent in terms of avoidance of immunological tolerance. However, since the clone obtained from the phage library is a single chain clone, it is necessary to prepare a complete antibody consisting of two chains according to a recombinant DNA technique or the like. Moreover, a change may be generated in affinity during the process of converting a single chain antibody to a complete antibody, and thus, there may be a considerable number of cases where a variable region sequence needs to be adjusted. Accordingly, in terms of time and effort, it cannot be said that the phage display method has been significantly improved in comparison to the method involving in vivo immunity.

[0005] As methods for overcoming the problem regarding the aforementioned existing method for producing a monoclonal antibody, an ADLib system (Patent Literature 1 and Non Patent Literature 1) and a method of further modifying such an ADLib system (Patent Literature 2) have been reported. The ADLib system is a technique capable of simply preparing a variety of antibodies with desired binding properties to all types of antigens. This method is a technique of selectively obtaining a desired antibody from an antibody library constructed from a chicken B cell-derived cell line DT40, in which antibody genes have become diversified autonomously. The ADLib system is superior to prior arts, in that it enables the avoidance of immunological tolerance, which is an advantage of an in vitro system antibody production technique, and in that a complete IgM antibody can be promptly obtained.

[0006] In general, in a case where an antibody is administered as a pharmaceutical product to an animal or a human, the antibody is required to be compatible with the type of the animal species, while considering minimization of immunogenicity in vivo. Hence, utilizing a DNA recombination technique, a chimeric antibody has been produced by replacing the constant region of a monoclonal antibody produced in mice or the like with a humanized constant region, and a humanized antibody has also been produced by transplanting the complementarity determining region (CDR) of the antibody into a human antibody. However, there may be a case where a change would occur in affinity or function in the process of such chimerization or humanization therefore it cannot be said that the probability of producing a humanized antibody that retains the original functions is high. Moreover, such a chimeric antibody or a humanized antibody only has a small region derived from other animal species therefore its complementarity determining region has immunogenicity, although its immunogenicity is lower than that of the original monoclonal antibody. Hence, such a chimeric antibody or a humanized antibody has been problematic in terms of the appearance of anti-antibody.

[0007] Thus, it has been attempted to produce an animal generating a human antibody by introducing a human antibody gene into a mouse. In Patent Literature 3, a microcell of a chromosomal fragment comprising a human antibody gene has been transplanted into mouse ES cells, and then, a chimeric mouse has been produced from the ES cells, thereby producing a chimeric mouse that expresses a human antibody. Moreover, in Non Patent Literature 2, genomic DNA in a mouse antibody gene locus has been replaced with the corresponding genomic DNA in a human antibody gene locus, so as to produce a chimeric mouse that expresses a human antibody. By both of the methods, it is possible to obtain an antibody having complementarity determining regions that are completely derived from human antibody genes. However, since in vivo immunity is utilized in both of the methods, the problems regarding time and effort required until a desired antibody is finally obtained have still remained.

[0008] Under the aforementioned circumstances, even in the case of using the ADLib system, a method of producing an antibody having an amino acid sequence derived from a human from chicken B cells is necessary to prepare an antibody drug. In addition, in order to treat various diseases, a technique of simply producing an antibody group having various antigen-recognizing properties is necessary.

[0009] Nevertheless, differing from a case where a human antibody gene is introduced into a mouse to “humanize” it, in a case where chicken B cells are “humanized,” a difference in the system of diversifying an antibody becomes problematic. In the case of animals such as a chicken, a rabbit, a bovine or sheep, there is a region in which “pseudogenes” are gathered, upstream of an antibody variable region. The sequence of the respective pseudogenes are similar to that of antibody variable region and are not translated by themselves. All or a part of variable region sequences are rewritten by pseudogene sequences by a phenomenon referred to as gene conversion, so that a variety of sequences are generated. Diversification of antibodies occurs as a result of V(D)J recombination in animals such as a human or a mouse. In contrast, in animals such as a chicken, a rabbit, a bovine or sheep, such diversification of antibodies occurs by a mechanism referred to as gene conversion that is completely different from the recombination. Moreover, since the pseudogene region has a structure comprising an extremely large number of repeating sequences, it is significantly difficult to analyze the sequence of this region. Thus, even at the time point of March 2015, the pseudogene region of a chicken antibody heavy chain has not yet been analyzed. Due to such a difference in mechanisms or a problem regarding the structure of an antibody gene locus, it has been considered extremely difficult to construct a system of producing a desired human antibody from chicken B cells.

[0010] Under such circumstances, it has been reported that a cell line was produced by replacing a variable region and a pseudogene region present in the antibody gene locus of DT40 cells with human-derived sequences (Non Patent Literature 3). In this publication, a chicken antibody variable region has been replaced with a gene sequence comprising fluorescent proteins, namely, a green fluorescent protein (GFP) and a cyan fluorescent protein (CFP), and an attP sequence as a recombinase-recognizing site, and a DT40 cell, into which a human antibody variable region and the after-mentioned pseudogene sequence had been inserted utilizing the recombinase, has been then produced, and thereafter, the occurrence of gene conversion has been confirmed (Non Patent Literatures 3 and 4). However, since a chicken-derived constant region sequence has been used, the expressed antibody molecule is a human-chicken chimeric antibody, and thus, the immunogenicity of the antibody is extremely high. Furthermore, since the light chain is a fusion protein of a human-derived κ chain and a chicken-derived λ chain, the antibody molecule is largely different from a native human antibody. Hence, in order to produce an antibody used for the treatment of humans, it is necessary to further carry out a chimerization operation, and it is still likely that affinity or functions will be changed in the process of chimerization or humanization. Further, with regard to the sequence of the pseudogene region used herein, in the case of a light chain, a minimalist library that is a cluster of artificial sequences, in which one amino acid in each of the CDR sequences of the inserted human antibody variable region has been substituted with Tyr or Trp, and the sequences in which mutations have been introduced into the framework region of a variant of a naturally existing human antibody variable region, have been utilized. On the other hand, a heavy chain thereof is composed of an artificial sequence in which each of the CDR sequences of the inserted human antibody variable region has been substituted with Tyr or Trp, and mutant sequences thereof. These sequences have been designed for the purpose of allowing a small number of pseudogenes to correspond to a variety of antigens. A method of obtaining an antigen-specific antibody in the cells has not been reported.

### CITATION LIST

### Patent Literature

[0011] Patent Literature 1: Japanese Patent No. 4214234
[0012] Patent Literature 2: WO 2008/047480
[0013] Patent Literature 3: WO 97/07671

### Non Patent Literature

[0014] Non Patent Literature 1: Seo et al., Nature Biotech, Volume 23, pp. 731-735, 2005
[0015] Non Patent Literature 2: Recombinant Antibodies for Immunotherapy, pp. 100-108, 2009, Cambridge Press
[0016] Non Patent Literature 3: Schusser et al., PLOS ONE, Volume 8 issue 11 e80108, 2013
[0017] Non Patent Literature 4: Leighton et al., Frontiers in Immunology, Volume 6 Article 126, 2015

### SUMMARY OF INVENTION

### Technical Problem

[0018] Under the aforementioned circumstances, it is an object of the present invention to provide chicken B cells, each of which produces each of various human antibodies.

[0019] It is another object of the present invention to provide a method for producing antibodies from the chicken B cells.

### Solution to Problem

[0020] The present inventors have conducted intensive studies regarding production of cells that produce a variety of human antibodies. As a result, the inventors have inserted or replaced the genes in the variable region and constant region of the light chain and heavy chain of a human antibody into chicken B cell antibody light chain and heavy chain gene loci, so that they have succeeded in obtaining transformed cells that each express a human antibody. Moreover, the present inventors have further produced transformed cells, in which a plurality of human-derived antibody variable region sequences have been inserted as pseudogenes into the light chain and heavy chain, and thereafter, the inventors have treated these cells with an HDAC inhibitor, so that they have confirmed that gene conversion has occurred in the transformed cells, as in the case of the original chicken B cells. Furthermore, the present inventors have also succeeded in producing an antigen-specific human antibody from the transformed cells.

[0021] That is to say, the present inventors have confirmed that the aforementioned cells are prepared, and from each of the prepared cell, antibody in which the variable region has been modified in various ways can be obtained, and they have then succeeded in producing a variety of human antibodies, thereby completing the present invention.

[0022] Specifically, the present invention includes the following (1) to (21):

(1) A chicken B cell, in which, in an antibody light chain gene locus thereof, all or a part of a DNA sequence derived from a human antibody light chain variable region and a human antibody light chain constant region are inserted, or the antibody light chain gene locus is replaced with all or a part of a DNA sequence derived from a human antibody light chain variable region and a human antibody light chain constant region, and in an antibody heavy chain gene locus thereof, all or a part of a DNA sequence derived from a human antibody heavy chain variable region and a human antibody heavy chain constant region are inserted, or the antibody heavy chain gene locus is replaced with all or a part of a DNA sequence derived from a human antibody heavy chain variable region and a human antibody heavy chain constant region, and in an antibody light chain pseudogene locus thereof, two or more DNA sequences derived from human antibody light chain variable regions are inserted, or the antibody light chain pseudogene locus is replaced with two or more DNA sequences derived from human antibody light chain variable regions, and/or in an antibody heavy chain pseudogene locus thereof, two or more DNA sequences derived from human antibody heavy chain variable regions are inserted, or the antibody heavy chain pseudogene locus is replaced with two or more DNA sequences derived from human antibody heavy chain variable regions.
(2) The chicken B cell according to (1) above, wherein the number of the DNA sequences derived from the human antibody light chain variable regions to be inserted into the antibody light chain pseudogene locus, or to be replaced with the sequences in the antibody light chain pseudogene locus is 5 or more.
(3) The chicken B cell according to (1) above, wherein the number of the DNA sequences derived from the human antibody heavy chain variable regions to be inserted into the antibody heavy chain pseudogene locus, or to be replaced with the sequences in the antibody heavy chain pseudogene locus is 5 or more.
(4) The chicken B cell according to (1) above, wherein the number of the DNA sequences derived from the human antibody light chain variable regions to be inserted into the antibody light chain pseudogene locus, or to be replaced with the sequences in the antibody light chain pseudogene locus is 15 or more.
(5) The chicken B cell according to (1) above, wherein the number of the DNA sequences derived from the human antibody heavy chain variable regions to be inserted into the antibody heavy chain pseudogene locus, or to be replaced with the sequences in the antibody heavy chain pseudogene locus is 15 or more.
(6) The chicken B cell according to any one of (1) to (5) above, wherein the position of the DNA sequence derived from the human antibody light chain variable region inserted into the antibody light chain gene locus is upstream of the position of the DNA sequence derived from the human antibody light chain constant region, and the position of the DNA sequence derived from the human antibody heavy chain variable region inserted into the antibody heavy chain gene locus is upstream of the position of the DNA sequence derived from the human antibody heavy chain constant region.
(7) The chicken B cell according to (6) above, wherein the positions of the DNA sequence derived from the human antibody light chain variable region and the DNA sequence derived from the human antibody light chain constant region inserted into the antibody light chain gene locus are upstream of the positions of a chicken antibody light chain variable region and a constant region thereof, and the positions of the human antibody heavy chain variable region and constant region inserted into the antibody heavy chain gene locus are upstream of the positions of a chicken antibody heavy chain variable region and a constant region thereof.
(8) The chicken B cell according to any one of (1) to (7) above, wherein the human antibody heavy chain is a γ chain.
(9) The chicken B cell according to any one of (1) to (8) above, wherein the human antibody light chain is a γ chain or a κ chain.
(10) The chicken B cell according to any one of (1) to (9) above, which has an ability to express a human antibody on the cell surface thereof and also to secrete the human antibody into a culture solution.
(11) The chicken B cell according to any one of (1) to (10) above, which is a DT40 cell.
(12) The chicken B cell according to any one of (1) to (11), which has undergone to a treatment of relaxing chromatin.
(13) The chicken B cell according to (12) above, wherein the treatment of relaxing chromatin is reduction or deletion of the function of histone deacetylase in the chicken B cell.
(14) The chicken B cell according to (13) above, wherein the method for reducing or deleting the function of histone deacetylase is reduction or deletion of the expression of a histone deacetylase gene in the chicken B cell.
(15) The chicken B cell according to (14) above, wherein the histone deacetylase is HDAC2.
(16) The chicken B cell according to (13) above, wherein the method for reducing or deleting the function of histone deacetylase is a treatment with an HDAC inhibitor.
(17) An antibody-producing cell library consisting of the chicken B cells according to any one of (12) to (16) above.
(18) A method for producing an antibody from the chicken B cells according to any one of (1) to (16) above.
(19) An antibody obtained by the method according to (18) above.
(20) A kit for producing the chicken B cells according to any one of (1) to (16) above.
(21) A kit for producing an antibody by the method according to (18) above.

### Advantageous Effects of Invention

[0023] It becomes possible to simply and promptly obtain human antibodies that recognize a variety of antigens from the cells of the present invention.

### BRIEF DESCRIPTION OF DRAWINGS

[0024] FIG. 1 is a view schematically showing the structure of a targeting vector for replacing the antibody light chain constant region and antibody light chain variable region of a DT40 cell with the light chain constant region and light chain variable region of a human-derived antibody (IgG). cpV1 to cpV3: chicken pseudogenes.

[0025] FIG. 2 is a view schematically showing the structure of a targeting vector for inserting a sequence for confirming gene conversion (GC confirmation sequence; a human pseudogene consisting of a sequence derived from a human antibody variable region, the same applied below) downstream of the antibody light chain pseudogene region of a DT40 cell. cpV1 to cpV3: chicken pseudogenes.

[0026] FIG. 3 is a view schematically showing the structure of a targeting vector for deleting the antibody light chain pseudogene region of a DT40 cell, and replacing the antibody light chain pseudogene region of the DT40 cell with a GC confirmation sequence. cpV25, cpV1: chicken pseudogenes.

[0027] FIG. 4 is a view schematically showing the structure of a targeting vector for replacing the antibody heavy chain constant region and antibody heavy chain variable region of a DT40 cell with the heavy chain constant region and heavy chain variable region of a human-derived antibody (IgG) and also for inserting a GC confirmation sequence therein.

[0028] FIG. 5 is a view schematically showing the procedures for replacing the antibody light chain gene regions of a DT40 cell with the light chain variable region and light chain constant region of a human-derived antibody, and the thus obtained antibody light chain gene region of the DT40 cell. cpV1 to cpV3: chicken pseudogenes.

[0029] FIG. 6 is a view schematically showing the procedures for replacing the antibody light chain gene regions of a DT40 cell with human-derived antibody light chain variable region and light chain constant region genes, and further inserting a GC confirmation sequence downstream of the antibody light chain pseudogene region of the DT40 cell, and the obtained DT40 cell antibody light chain gene region. cpV1 to cpV3: chicken pseudogenes; and hpV1 and hpV2: human pseudogenes.

[0030] FIG. 7 is a view schematically showing the procedures for replacing the antibody light chain gene regions of a DT40 cell with human-derived antibody light chain variable region and light chain constant region genes, and further deleting the antibody light chain pseudogene region of the DT40 cell, and the thus obtained antibody light chain gene region of the DT40 cell. cpV25 and cpV1: chicken pseudogenes.

[0031] FIG. 8 is a view schematically showing the procedures for replacing the antibody light chain gene regions of a DT40 cell with human-derived antibody light chain variable region and light chain constant region genes, and further replacing the pseudogene region of the DT40 cell with a GC confirmation sequence, and the obtained DT40 cell antibody light chain gene region. cpV25 and cpV1: chicken pseudogenes; and hpV1 and hpV2: human pseudogenes.

[0032] FIG. 9 shows the results obtained by analyzing by flow cytometry an antibody produced by a cell line in which a human-derived antibody light chain gene region has been inserted into the antibody light chain gene region of a DT40 cell, or a cell line in which the antibody light chain gene region of a DT40 cell has been replaced with a human antibody light chain gene.

[0033] FIG. 10 is a view schematically showing the procedures for converting the antibody heavy chain gene regions of a DT40 cell to the heavy chain variable region and heavy chain constant region of a human-derived antibody, and the thus obtained antibody heavy chain gene region of the DT40 cell.

[0034] FIG. 11 is a view schematically showing the procedures for converting the antibody heavy chain gene regions of a DT40 cell to the heavy chain variable region and heavy chain constant region gene of a human-derived antibody, and further inserting a GC confirmation sequence downstream of the heavy chain pseudogene region of the DT40 cell, the thus obtained antibody light chain gene region of the DT40 cell, and the structure of the used targeting vector. hpV1 and hpV2: human pseudogenes.

[0035] FIG. 12 shows the results obtained by analyzing by flow cytometry an antibody produced by a cell line, in which the antibody heavy chain gene regions of a DT40 cell have been replaced with human-derived antibody heavy chain variable region and heavy chain constant region genes, and further, a GC confirmation sequence has been inserted downstream of the heavy chain pseudogene region of the DT40 cell.

[0036] FIG. 13 is a view schematically showing the procedures for replacing the antibody light chain pseudogene region of a DT40 cell with a pseudogene consisting of a sequence derived from a human Igγ variable region (human light chain pseudogene), the thus obtained antibody light chain region of the DT40 cell, and the structure of the used targeting vector.

[0037] FIG. 14 is a view schematically showing the structure of a targeting vector for replacing the antibody heavy chain constant region of a DT40 cell with the heavy chain gene region of human IgG₁.

[0038] FIG. 15 is a view schematically showing the structure of a targeting vector for introducing the heavy chain variable region of a human-derived antibody and five pseudogenes consisting of human Igγ variable region-derived sequences (human heavy chain pseudogenes) into the antibody heavy chain variable region of a DT40 cell.

[0039] FIG. 16 is a view schematically showing the procedures for replacing the antibody light chain gene regions of a DT40 cell with the light chain variable region and light chain constant region of a human-derived antibody, and then inserting human light chain pseudogene sequences (five sequences) therein, and the thus obtained antibody light chain gene region of the DT40 cell. cpV25 and cpV1: chicken pseudogenes.

[0040] FIG. 17 is a view schematically showing the procedures for introducing the heavy chain variable region and heavy chain constant region of a human-derived antibody into the antibody heavy chain gene regions of a DT40 cell, and then inserting human heavy chain pseudogene sequences (five sequences) therein, and the thus obtained antibody heavy chain gene region of the DT40 cell.

[0041] FIG. 18 shows the results obtained by analyzing by flow cytometry an antibody produced by a cell line, in which the antibody light chain gene region and antibody heavy chain gene region of a DT40 cell have been replaced with human-derived antibody genes, and human light chain pseudogene sequences (five sequences) have been then inserted therein.

[0042] FIG. 19 is a view schematically showing the procedures for replacing the antibody light chain gene regions of a DT40 cell with the light chain variable region and light chain constant region of a human-derived antibody, and then inserting human heavy chain pseudogene sequences (15 sequences) therein, and the structure of the used targeting vector. pV25 and pV1: chicken pseudogenes.

[0043] FIG. 20 is a view schematically showing the procedures for introducing the heavy chain variable region and heavy chain constant region of a human-derived antibody into the antibody heavy chain gene regions of a DT40 cell, and then inserting human heavy chain pseudogene sequences (15 sequences) therein, and the structure of the used targeting vector.

[0044] FIG. 21 shows the results obtained by analyzing by flow cytometry an antibody produced by an antibody produced by an L15/H15 cell line, in which the antibody light chain gene region and antibody heavy chain gene region of a DT40 cell have been replaced with the gene regions of a human-derived antibody, and human light chain pseudogene sequences (15 sequences) have been then inserted therein.

[0045] FIG. 22 shows the results shown in FIG. 21, in which incorrect data have been corrected based on the data before the priority date.

[0046] FIG. 23 is a view schematically showing the procedures for replacing the antibody heavy chain variable region of a DT40 cell with the heavy chain variable region of a human-derived antibody, and at the same time, inserting a cassette sequence for RMCE into the antibody heavy chain variable region of the DT40 cell, and the structure of the used targeting vector.

[0047] FIG. 24 is a view schematically showing the procedures for inserting 30 human heavy chain pseudogene sequences into the antibody heavy chain gene region of a DT40 cell, and the structure of the used targeting vector.

[0048] FIG. 25 shows the results obtained by analyzing by flow cytometry an antibody produced by an L15/H30 cell line, in which the antibody light chain gene region and antibody heavy chain gene region of a DT40 cell have been replaced with the gene regions of a human-derived antibody, and thereafter, 15 human light chain pseudogene sequences have been inserted into the light chain and 30 human heavy chain pseudogene sequences have been inserted into the heavy chain.

[0049] FIG. 26 is a view schematically showing the procedures for inserting 30 human light chain pseudogene sequences into the antibody light chain gene region of a DT40 cell, and the structure of the used targeting vector.

[0050] FIG. 27 shows the results obtained by analyzing by flow cytometry an antibody produced by an L30/H30 cell line, in which the antibody light chain gene region and antibody heavy chain gene region of a DT40 cell have been replaced with the gene regions of a human-derived antibody, and thereafter, 30 human light chain pseudogene sequences have been inserted into the light chain and 30 human heavy chain pseudogene sequences have been inserted into the heavy chain.

[0051] FIG. 28 shows the results obtained by analyzing by flow cytometry an antibody produced by an L30/H15 cell line, in which the antibody light chain gene region and antibody heavy chain gene region of a DT40 cell have been replaced with the gene regions of a human-derived antibody, and thereafter, 30 human light chain pseudogene sequences have been inserted into the light chain and 15 human heavy chain pseudogene sequences have been inserted into the heavy chain.

[0052] FIG. 29 is a view schematically showing the procedures for additionally inserting 15 human heavy chain pseudogene sequences into the antibody heavy chain gene region of the L30/H15 cell line in the forward or reverse direction according to an RMCE method, so as to have 30 human pseudogene sequences in total, and the structure of the used targeting vector. In the figure, the symbols “for” and “rev” indicate the forward direction and the reverse direction, respectively. The same is applied to other figures below.

[0053] FIG. 30 shows the results obtained by analyzing by flow cytometry an antibody produced by a cell line, in which 15 human heavy chain pseudogene sequences have been additionally inserted into the L30/H15 cell line in the forward or reverse direction according to the RMCE method (which is an L30/H15f15f cell line in the case of the forward direction, and an L30/H15r15f cell line in the case of the reverse direction).

[0054] FIG. 31 is a view schematically showing the procedures for additionally inserting 15 human heavy chain pseudogene sequences to each of the antibody heavy chain gene regions of the L30/H15f15f cell line and the L30/H15r15f cell line in the forward or reverse direction, so as to have 45 human pseudogene sequences in total, and the structure of the used targeting vector.

[0055] FIG. 32 shows the results obtained by analyzing by flow cytometry an antibody produced by a cell line (L30/H15f15f15f cell line), in which 15 human heavy chain pseudogene sequences have been additionally inserted into the antibody heavy chain gene region of the L30/H15f15f cell line in the forward direction.

[0056] FIG. 33 shows the results obtained by analyzing by flow cytometry an antibody produced by a cell line (L30/H15r15r15f cell line), in which 15 human heavy chain pseudogene sequences have been additionally inserted into the antibody heavy chain gene region of the L30/H15r15f cell line in the reverse direction.

[0057] FIG. 34 is a view schematically showing the procedures for additionally inserting 15 human heavy chain pseudogene sequences into each of the antibody heavy chain gene regions of the L30/H15f15f15f cell line and the L30/H15r15r15f cell line in the forward or reverse direction according to the RMCE method, so as to have 60 human pseudogene sequences in total, and the structure of the used targeting vector.

[0058] FIG. 35 shows the results obtained by analyzing by flow cytometry an antibody produced by a cell line, in which 30 human light chain pseudogene sequences have been inserted into the antibody light chain gene region of a DT40 cell, and 60 human heavy chain pseudogene sequences have been inserted into the antibody heavy chain gene region thereof.

[0059] FIG. 36 shows the results obtained by separating a cell population binding to a Plexin A4 protein from a TSA-treated L15/H15 cell line using an ADLib system, and then analyzing the cell population by flow cytometry.

[0060] FIG. 37 shows the results obtained by performing single cell sorting on a cell population in the P5 area of FIG. 36, plating the obtained cells on a 96-well plate to culture them, and carrying out ELISA analysis on the cell supernatant in each well. The horizontal axis indicates the number of each well fraction of the 96-well plate, from which the cell supernatant used as a measurement sample is derived. Trypsin inhibitor: trypsin inhibitor; SA: streptavidin; OA: ovalbumin.

[0061] FIG. 38 shows the results obtained by analyzing antibodies secreted from positive clones #62 and #20 according to Western blotting. The samples were treated under reduction and non-reduction conditions, and Western blotting was then carried out on the samples, using a goat anti-human IgGγ antibody.

[0062] FIG. 39 shows the results obtained by analyzing antibodies secreted from positive clones #62 and #20 according to Western blotting. The samples were treated under reduction and non-reduction conditions, and Western blotting was then carried out on the samples, using a goat anti-human IgGγ antibody.

[0063] FIG. 40 shows the results obtained by analyzing antibodies secreted from positive clones #62 and #20 according to Western blotting. The samples were treated under reduction and non-reduction conditions, and Western blotting was then carried out on the samples, using a goat anti-chicken IgM antibody.

[0064] FIG. 41 shows the results of a primary screening of a cell population binding to His-AP-hSema3A from the TSA-treated L15/H15 cell line, which has been carried out using an ADLib system.

[0065] FIG. 42 shows the results of a secondary screening, which has been carried out after the monocloning of the cell population binding to His-AP-hSema3A.

[0066] FIG. 43 shows the results obtained by analyzing by Western blotting a His-AP-hSema3A antibody secreted from the positive clones after completion of the secondary screening. The samples were treated under reduction and non-reduction conditions, and Western blotting was then carried out on the samples, using a goat anti-human IgGγ antibody or a goat anti-human IgG antibody.

[0067] FIG. 44 shows the results of a primary screening of a cell population binding to IL-8 from a TSA-treated L30/H45 cell line, which has been carried out using an ADLib system.

[0068] FIG. 45 shows the results of a secondary screening, which has been carried out after the monocloning of the cell population binding to IL-8.

[0069] FIG. 46 shows the results obtained by analyzing by Western blotting an IL-8 antibody secreted from the positive clones after completion of the secondary screening. The samples were treated under reduction and non-reduction conditions, and Western blotting was then carried out on the samples, using a goat anti-human IgGγ antibody or a goat anti-human IgGλ antibody.

### DESCRIPTION OF EMBODIMENTS

[0070] One embodiment of the present invention is a chicken B cell, in which, in an antibody light chain gene locus thereof, all or a part of a DNA sequence derived from a human antibody light chain variable region and a human antibody light chain constant region are inserted, or the antibody light chain gene locus is replaced with all or a part of a DNA sequence derived from a human antibody light chain variable region and a human antibody light chain constant region, and in an antibody heavy chain gene locus thereof, all or a part of a DNA sequence derived from a human antibody heavy chain variable region and a human antibody heavy chain constant region are inserted, or the antibody heavy chain gene locus is replaced with all or a part of a DNA sequence derived from a human antibody heavy chain variable region and a human antibody heavy chain constant region, and in an antibody light chain pseudogene locus thereof, two or more DNA sequences derived from human antibody light chain variable regions are inserted, or the antibody light chain pseudogene locus is replaced with two or more DNA sequences derived from human antibody light chain variable regions, and/or in an antibody heavy chain pseudogene locus thereof, two or more DNA sequences derived from human antibody heavy chain variable regions are inserted, or the antibody heavy chain pseudogene locus is replaced with two or more DNA sequences derived from human antibody heavy chain variable regions.

[0071] The B cell of the present invention is an antibody-producing B cell derived from a chicken, and an example of the B cell of the present invention can be a DT 40 cell from a chicken. Other than such DT40 cells, B cells from a bovine, sheep, a rabbit and the like, which have a system for diversifying antibody sequences according to gene conversion, can also be used.

[0072] Moreover, in addition to the aforementioned configuration such that, in an antibody light chain gene locus thereof, all or a part of a DNA sequence derived from a human antibody light chain variable region and a human antibody light chain constant region are inserted, or the antibody light chain gene locus is replaced with all or a part of a DNA sequence derived from a human antibody light chain variable region and a human antibody light chain constant region, and in an antibody heavy chain gene locus thereof, all or a part of a DNA sequence derived from a human antibody heavy chain variable region and a human antibody heavy chain constant region are inserted, or the antibody heavy chain gene locus is replaced with all or a part of a DNA sequence derived from a human antibody heavy chain variable region and a human antibody heavy chain constant region, and in an antibody light chain pseudogene locus thereof, two or more DNA sequences derived from human antibody light chain variable regions are inserted, or the antibody light chain pseudogene locus is replaced with two or more DNA sequences derived from human antibody light chain variable regions, and/or in an antibody heavy chain pseudogene locus thereof, two or more DNA sequences derived from human antibody heavy chain variable regions are inserted, or the antibody heavy chain pseudogene locus is replaced with two or more DNA sequences derived from human antibody heavy chain variable regions, the chicken B cell of the present invention may also comprise mutations or modifications in other gene regions and the like.

[0073] The term “antibody light chain gene locus” is used herein to mean a gene locus in which a gene encoding the light chain variable region and light chain constant region of an antibody is present, and the term “antibody heavy chain gene locus” is a gene locus in which a gene encoding the heavy chain variable region and heavy chain constant region of an antibody is present.

[0074] In addition, the term “pseudogene” is used herein to mean a DNA sequence that is similar to a functional gene but does not function as an expressing gene. The chicken antibody light chain pseudogene locus and the chicken heavy chain pseudogene locus are each located upstream of the antibody light chain gene locus and heavy chain gene locus, in which the functional gene is present, and contribute to generate the diversity as a result of gene conversion. A pseudogene is not present in an antibody gene locus in human genome, but in the present description, a DNA sequence having a sequence similar to a human antibody variable region, which has been introduced into a chicken antibody gene locus for the purpose of causing gene conversion with the inserted human antibody variable region, is collectively referred to as a “human pseudogene.”

[0075] A DNA sequence derived from a human antibody light chain variable region and a human antibody light chain constant region, which have been inserted into a chicken antibody light chain gene locus or have been replaced with a sequence in the chicken antibody light chain gene locus, may be all of the sequence of the human antibody light chain variable region and the human antibody light chain constant region, or may also be a part of the sequence. Moreover, the position of the DNA sequence derived from the human antibody light chain variable region inserted into the chicken antibody light chain gene locus is desirably upstream of a position, into which the DNA sequence derived from the human antibody light chain constant region has been inserted.

[0076] Likewise, a DNA sequence derived from a human antibody heavy chain variable region and a human antibody heavy chain constant region, which have been inserted into a chicken antibody heavy chain gene locus or have been replaced with a sequence in the chicken antibody heavy chain gene locus, may be all of the sequence of the human heavy chain variable region and the human heavy chain constant region, or may also be a part of the sequence. Moreover, the position of the DNA sequence derived from the human antibody heavy chain variable region inserted into the chicken antibody heavy chain gene locus is desirably upstream of a position, into which the DNA sequence derived from the human antibody heavy chain constant region has been inserted.

[0077] Furthermore, the positions of the DNA sequences derived from the human antibody heavy chain variable region and the human antibody constant region inserted into the chicken antibody light chain gene locus are desirably upstream of the positions of DNA sequence derived from a chicken antibody light chain variable region and a chicken antibody light chain constant region. Likewise, the positions of the DNA sequences derived from the human antibody heavy chain variable region and the human antibody heavy chain constant region inserted into the chicken antibody heavy chain gene locus are desirably upstream of the positions of the chicken antibody heavy chain variable region and the chicken antibody heavy chain constant region.

[0078] In the present embodiment, the DNA sequences derived from the human antibody light chain variable region, which have been inserted into the chicken antibody light chain pseudogene locus or have been replaced with the DNA sequences in the chicken antibody light chain pseudogene locus (which are also referred to as “human light chain pseudogene sequences” in the present description and drawings) can be the sequences of known human antibody light chain variable regions. Such sequence information can also be obtained from websites such as V Base (http://www2.mrc-lmb.cam.ac.uk/vbase/list2.php). As such human light chain pseudogene sequences, DNA sequences comprising all or a part of the CDR1, CDR2 and CDR3 of the human antibody light chain variable region can be used. It is desirable that each CDR be not identical to the DNA sequence of the human antibody light chain variable region that has been inserted into the chicken antibody light chain gene locus or has been replaced with the sequence in the chicken antibody light chain gene locus, or to the CDRs of other human light chain pseudogene sequences. Moreover, it is desirable that the framework (FW) region of the human light chain pseudogene sequence be identical to that of the human antibody light chain variable region that has been inserted into the chicken antibody light chain gene locus or has been replaced with the sequence in the chicken antibody light chain gene locus. For instance, when the DNA sequence of SEQ ID NO: 5 is selected as an antibody light chain variable region, the sequences shown in SEQ ID NO: 69 to SEQ ID NO: 88 and SEQ ID NO: 127 to SEQ ID NO: 141 can be used in combination as a light chain pseudogene.

[0079] Likewise, the DNA sequences derived from the human antibody heavy chain variable regions, which have been inserted into the chicken antibody heavy chain pseudogene locus or have been replaced with the DNA sequences in the chicken antibody heavy chain pseudogene locus (which are also referred to as “human heavy chain pseudogene sequences” in the present description and drawings) can be the sequences of known human antibody heavy chain variable regions. Such sequence information can also be obtained from websites such as V Base (http://www2.mrc-lmb.cam.ac.uk/vbase/list2.php). As such human heavy chain pseudogene sequences, DNA sequences comprising all or a part of the CDR1, CDR2 and CDR3 of the human antibody heavy chain variable regions can be used. It is desirable that each CDR be not identical to the DNA sequence of the human antibody heavy chain variable region that has been inserted into the chicken antibody heavy chain gene locus or has been replaced with the sequence in the chicken antibody heavy chain gene locus, or to the CDRs of other human heavy chain pseudogene sequences. Moreover, it is desirable that the framework (FW) regions of the human heavy chain pseudogene sequences be identical to that of the human antibody heavy chain variable region that has been inserted into the chicken antibody heavy chain gene locus or has been replaced with the sequence in the chicken antibody heavy chain gene locus. For instance, when the DNA sequence of SEQ ID NO: 30 is selected as an antibody heavy chain variable region, the sequences shown in SEQ ID NO: 89 to SEQ ID NO: 108, SEQ ID NO: 127 to SEQ ID NO: 141, SEQ ID NO: 147 to SEQ ID NO: 161, and SEQ ID NO: 165 to SEQ ID NO: 179 can be used in combination as a heavy chain pseudogene.

[0080] In the present embodiment, the position of the DNA sequences derived from the human antibody light chain variable regions inserted into the chicken antibody light chain pseudogene locus is desirably upstream of the position of the human antibody light chain variable region inserted into the chicken antibody light chain gene locus. In addition, when a chicken antibody light chain pseudogene sequence remains, the DNA sequences derived from the human antibody light chain variable regions is desirably located downstream of the chicken antibody light chain pseudogene region. Likewise, the position of the DNA sequences derived from the human antibody heavy chain variable regions inserted into the chicken antibody heavy chain pseudogene locus is desirably upstream of the position of the human antibody heavy chain variable region inserted into the chicken antibody heavy chain gene locus. In addition, when a chicken antibody heavy chain pseudogene sequence remains, the DNA sequence derived from the human antibody heavy chain variable regions is desirably located downstream of the chicken antibody heavy chain pseudogene region.

[0081] Moreover, in the present embodiment, the DNA sequences derived from the human antibody variable regions, which are inserted or substituted as a pseudogene upstream of the chicken antibody variable region, may be used either in the same direction as, or in the direction opposite to, the direction of the human antibody variable region sequence inserted or substituted into the chicken antibody variable region.

[0082] The number of the DNA sequences derived from the human antibody light chain variable regions, which are inserted into the chicken antibody light chain pseudogene locus, or are substituted (replaced) with pseudogenes in the chicken antibody light chain pseudogene locus, is preferably 2 or more, more preferably 5 or more, 7 or more, 9 or more, 11 or more, 13 or more, further preferably 15 or more, 20 or more, or 25 or more. Likewise, the number of DNA sequences derived from the human antibody heavy chain variable regions, which are inserted into the chicken antibody heavy chain pseudogene locus, or are substituted (replaced) with pseudogenes in the chicken antibody heavy chain pseudogene locus, is preferably 2 or more, more preferably 5 or more, 7 or more, 9 or more, 11 or more, 13 or more, further preferably 15 or more, 20 or more, 25 or more, and most preferably 30 or more.

[0083] It is to be noted that the DNA sequence derived from the human antibody light chain variable region or the DNA sequence derived from the human antibody heavy chain variable region, which is used herein, is considered to be one DNA sequence, when it is a series of continuous variable region homologous sequences contained in a region over a variable region, and comprises any one of FW1, CDR1, FW2, CDR2, FW3, CDR3 and FW4.

[0084] In the present embodiment, the type of a human antibody heavy chain, which is inserted into the chicken antibody heavy chain gene locus, may be any one of a γ chain, an s chain, an α chain, a β chain and a ε chain. It is preferably a γ chain. On the other hand, the type of a human antibody light chain, which is inserted into the chicken antibody light chain gene locus and the chicken antibody light chain pseudogene locus may be either a λ chain or a κ chain.

[0085] In the present embodiment, in order to use the transgenic chicken B cell for preparing an antibody library, the chicken B cell preferably does not only express a human antibody on the cell membrane thereof, but it also has an ability to secrete the human antibody into a culture solution. Therefore, when the introduced human antibody gene is transcribed, alternative splicing similar to an in vivo expression control mechanism needs to appropriately take place. Thus, with regard to introduction of the constant region, it is ideal to use a genomic structure that is completely identical to the constant region of a chicken antibody heavy chain constant region. However, since the nucleotide sequence of the genomic region of a chicken has not yet been analyzed at the time point of March 2015, this cannot be used. In the present embodiment, an intron sequence in the genomic sequence of a mouse antibody heavy chain has been used, and as a result, a human antibody on the surface of a cell membrane and a secretory human antibody have been successfully expressed at the same time. Accordingly, it is also possible to use, as a substitute, an intron sequence derived from known mammalian animals such as a mouse or a human.

[0086] In the present embodiment, a knocking-in method involving homologous recombination is used as a method of inserting a human antibody gene into a chicken antibody gene locus and/or replacing the gene in the chicken antibody gene locus with a human antibody gene. Moreover, as methods of inserting human antibody variable region-derived sequences into the pseudogene region in the chicken antibody chain gene locus and/or replacing the gene in the chicken antibody chain gene locus with a human antibody gene, a knocking-in method involving homologous recombination and a recombinase mediated cassette exchange (RMCE) method involving site-specific recombination can be preferably used.

[0087] As described above, a chicken B cell produced in the present embodiment means a chicken B cell, into which DNA sequences derived from a human antibody gene locus have been inserted, or which have been replaced with the DNA sequences derived from the human antibody gene locus; and a chicken B cell, in which a wide variety of mutations have been further introduced into the human-derived antibody light chain or heavy chain variable region of the aforementioned cell. Diversification of antibodies can be achieved by reorganization of the variable region that will cause generation of various variable region sequences. Therefore, a chicken B cell produced in the present embodiment also means a chicken B cell on which a treatment of introducing various mutations necessary for the reorganization of the variable region has been performed. Herein, examples of the method of introducing a mutation necessary for the reorganization of the variable region, which can be used herein, include methods known in the present technical field, such as a method of using B cells in which XRCC2 and XRCC3 have been deleted (e.g., Cumber et al., Nature Biotech. 204: 1129-1134 2002, JP Patent Publication (Kokai) No. 2003-503750 A, etc.), a method of controlling the expression of an AID gene (e.g., Kanayama et al., Nucleic Acids Res. 34: e10, 2006, JP Patent Publication (Kokai) No. 2004-298072 A, etc.), and a method of relaxing chromatin to promote gene conversion (e.g., Patent Literature 1, Patent Literature 2, Non Patent Literature 1, etc.). Among others, a method of relaxing chromatin to promote gene conversion is particularly preferable.

[0088] An example of the method of relaxing chromatin in a chicken B cell can be a method, which comprises inhibiting histone deacetylase (HDAC) activity existing in the chicken B cell by a certain method, and thereby significantly promoting gene conversion in the cell (for details, see the above-mentioned Patent Literature 1, Patent Literature 2, Non Patent Literature 1, etc.). As methods of inhibiting the activity of HDAC existing in cells, a method of treating the B cell of the present invention with an HDAC inhibitor (see Patent Literature 1 or Non Patent Literature 1), a method of reducing or deleting the function of an HDAC gene in a chicken B cell (see Patent Literature 2), and the like can be used. The HDAC inhibitor is not particularly limited, as long as it is able to inhibit the activity of HDAC. Examples of the HDAC inhibitor that can be used herein include trichostatin A (TSA), butyric acid, valproic acid, suberoylanilide hydroxamic acid (SAHA), CBHA (m-carboxycinnamic acid bis-hydroxamide), PTACH, Apicidin, Scriptaid, M344, APHA compound 8, BML-210, Oxamflatin, and MS-275. Other than these substances, an inactive-type protein of the HDAC as a target of activity inhibition (a dominant negative) may also be used as an inhibitory substance, if possible.

[0089] When the function of an HDAC gene is reduced or deleted, isoforms of the HDAC as a target whose gene function is to be reduced or deleted vary depending on an antibody-producing B cell used. The isoform is preferably an HDAC2 gene (for details, see Patent Literature 2).

[0090] The embodiment of the present invention that is relevant to the above-described embodiment includes an antibody-producing cell library consisting of the chicken B cells of the present invention. The present cell library means a population of the chicken B cells of the present invention that produce antibodies reacting with various antigens. The chicken B cell according to the above-described embodiment of the present invention is a cell, in which variation is generated in the variable region sequence of an antibody produced by the cell, by insertion of DNA sequences derived from a human-derived antibody variable regions into a chicken antibody pseudogene locus, etc., and the sequence of the antibody variable region is further diversified by a treatment of relaxing chromatin, so that the cell can have an ability to produce antibodies reacting with various antigens.

[0091] Therefore, a population comprising a plurality of the chicken B cells of the present invention can be a cell population producing antibodies reacting with various antigens.

[0092] Other embodiments of the present invention relate to a method for producing an antibody from the chicken B cell of the present invention, and a produced antibody.

[0093] The antibody produced from the chicken B cell of the present invention is a humanized antibody, and more preferably a human antibody. The humanized antibody means an antibody, in which a part of a sequence derived from a chicken gene is comprised in the amino acid sequence of the heavy chain or light chain of a produced antibody, and the human antibody means an antibody, in which the entire amino acid sequence of the heavy chain or light chain of a produced antibody is a sequence derived from a human gene.

[0094] When the chicken B cell of the present invention is cultured under culture conditions suitable for the cell, it produces a humanized antibody or a human antibody. It has been known that, in a cell line derived from chicken B cells such as DT40 cells, gene conversion occurs in an antibody gene locus thereof, although it does not occur with high efficiency. Thus, such gene conversion occurs also in the chicken B cell of the present invention, and primary variation in the produced antibodies is achieved by gene conversion occurring in an antibody gene locus, into which a human-derived antibody gene has been inserted. Moreover, by relaxing chromatin in the chicken B cell of the present invention, the gene conversion efficiency in the antibody gene locus is further increased, so that a population of chicken B cells capable of producing more various antibodies can be prepared. In order to select chicken B cells producing antibodies exhibiting desired antigen specificity by utilizing the relaxing of chromatin, an ADLib system can be used. The above-mentioned antibody-producing cell library can also be prepared by utilizing the ADLib system (see Patent Literature 1 or Non Patent Literature 1).

[0095] Furthermore, in particular, as a method of obtaining a desired antibody reacting with a membrane-bound protein, an ADLib axCELL (antigen expressing cell) method can be utilized (WO2010/064454).

[0096] Another embodiment of the present invention includes a kit for producing the chicken B cell of the present invention or producing an antibody.

[0097] The kit for producing the chicken B cell comprises: a medium, supplements and the like that are necessary for the culture of the chicken B cell; a vector used for inserting a DNA sequence derived from a human antibody gene into the antibody gene locus of the chicken B cell, or replacing the chicken B cell antibody gene locus with the DNA sequence derived from the human antibody gene; and reagents. In addition, the kit for producing the chicken B cell may also comprise: elements necessary for preparing an antibody-producing cell library, such as an HDAC inhibitor; and reagents necessary for reducing or deleting the function of the HDAC genes.

[0098] On the other hand, the kit for producing an antibody may comprise, as reagents for selecting an antibody having desired antigen specificity, all types of items that are considered necessary for production of the antibody. Examples of such reagents include various antigens, magnetic beads, a reagent for preparing such magnetic beads, a labeled antibody used to select an antibody, and a plate necessary for examinations such as ELISA, which are.

[0099] Hereinafter, the present invention will be described more in detail in the following examples. However, these examples are not intended to limit the scope of the present invention.

### Examples

### Confirmation of Gene Conversion

### 1. Preparation of Vectors

### 1-1. Replacement of Constant Region and Variable Region of Chicken Antibody Light Chain (Igλ) (Human LC KI Vector)

[0100] For replacement of the constant region and variable region of chicken Igλ, a targeting vector as shown in FIG. 1 was prepared. Methods for preparing individual parts will be described below.

### (1) Variable Region and Constant Region of Human Igλ

[0101] cDNA prepared from a human Burkitt's lymphoma cell line Ramos was used as a template, and PCR was carried out using a sense primer (TCCACCATGGCCTGGGCTCTG) (SEQ ID NO: 1) and an antisense primer (GTTGAGAACCTATGAACATTCTGTAGGGGCCAC) (SEQ ID NO: 2), so that the variable region and constant region of a human antibody light chain (Igλ) were amplified. The amplified regions were cloned into pGEM-T-Easy (Promega) to obtain pGEM-hIgG1-LC. This plasmid pGEM-hIgG1-LC was used as a template, and PCR was carried out using a sense primer (ATTGGCGCGCCTCTCCAGGTTCCCTGGTGCAGGCACAGTCTGCCCTGACTCAGC) (SEQ ID NO: 3) and an antisense primer (TTCCATATGAGCGACTCACCTAGGACGGTCAGCTTGGTCC) (SEQ ID NO: 4), so as to obtain the variable region (SEQ ID NO: 5) of human Igλ.

[0102] Moreover, the pGEM-hIgG1-LC was used as a template, and PCR was carried out using a sense primer (ATTGGCGCGCCTCTGCCTCTCTCTTGCAGGTCAGCCCAAGGCTGCCCCCTC) (SEQ ID NO: 6) and an antisense primer (GGAATTCCATATGGAGTGGGACTACTATGAACATTCTGTAGGGG) (SEQ ID NO: 7), so as to obtain the constant region (SEQ ID NO: 8) of human Igλ.

### (2) Left Arm

[0103] The genomic DNA of a chicken B cell line DT40 was used as a template, and PCR was carried out using a sense primer (GAGATCTCCTCCTCCCATCC) (SEQ ID NO: 9) and an antisense primer (CAAAGGACACGACAGAGCAA) (SEQ ID NO: 10), so that a region ranging from upstream of the variable region of chicken Igλ to downstream of the constant region thereof was amplified. A functional allele was separated from a non-functional allele by electrophoresis. The functional allele with a size of approximately 8.0 kbp was cut out, and it was then cloned into pGEM-T-Easy to obtain pGEM-cIgM-LCgenome. Using the pGEM-cIgM-LCgenome as a template, PCR was carried out with a sense primer (TGTCTCGAGTGAAGGTCACCAAGGATGG) (SEQ ID NO: 11) and an antisense primer (TTAAGCTTGGAGAGGAGAGAGGGGAGAA) (SEQ ID NO: 12), so as to obtain Left Arm shown in SEQ ID NO: 13.

### (3) Center Arm

[0104] Based on the sequence analysis of the pGEM-cIgM-LCgenome, the sequence of an intron region located between the variable region and the constant region of chicken Igλ was determined, and Center Arm shown in SEQ ID NO: 14 (wherein a blasticidin resistance gene having loxP sequences at both ends was inserted into the midstream thereof) was then synthesized.

### (4) Right Arm

[0105] The sequence of a region downstream of the constant region of chicken Igλ was determined using the pGEM-cIgM-LCgenome, and Right Arm shown in SEQ ID NO: 15 (wherein a neomycin resistance gene having lox2272 sequences at both ends was inserted into the midstream thereof) was then synthesized.

### (5) Construction of Targeting Vector

[0106] The above-described Left Arm, human Igλ variable region, Center Arm, human Igλ constant region, and Right Arm were incorporated into pBluescript to have the structure shown in FIG. 1, so as to obtain a human LC KI vector. The gene sequence of this vector is shown in SEQ ID NO: 16.

1-2. Knocking-in into Downstream of Chicken Antibody Light Chain (Igλ) Pseudogene Region (KI-C-IN Vector)

[0107] In order to insert a sequence for confirming gene conversion (a GC confirmation sequence; a human pseudogene consisting of a sequence derived from the variable region of human Igλ) (SEQ ID NO: 17) downstream of the pseudogene region of chicken Igλ, a targeting vector as shown in FIG. 2 was first produced. Methods for preparing individual parts will be described below.

### (1) Left Arm

[0108] The genomic DNA of DT40 was used as a template, and a 4.3-kb region (pseudogenes (pV) 1 to 3) located upstream of the promoter in the variable region was amplified by PCR using a sense primer (TTCTGTGAGCTGAGAAAAGGAGTGTA) (SEQ ID NO: 18) and an antisense primer (CCTGCATTGTGGCACAGCGGGGTT) (SEQ ID NO: 19), and it was then cloned into pCR4blunt-TOPO (Life Technologies) to obtain pCR4-cIgM-LC pV1 genome. Based on this sequence, a region comprising pV1-3 (SEQ ID NO: 20) was cloned, so as to obtain Left Arm.

### (2) Right Arm

[0109] Based on the sequence of the pCR4-cIgM-LCpV1 genome obtained in the above section, a portion that is a region between pV1 and the promoter (SEQ ID NO: 21) was cloned, so as to obtain Right Arm.

### (3) Construction of Targeting Vector

[0110] The above-described Left Arm, neomycin resistance gene, and Right Arm were incorporated into the pCR4blunt-TOPO to have the structure shown in FIG. 2, so as to obtain a KI-C-IN vector. The gene sequence of this vector is shown in SEQ ID NO: 22.

### 1-3. Insertion of GC Confirmation Sequence Downstream of Pseudogene Region of Chicken Antibody Light Chain (Igλ) (KI-C-IN-C Vector)

[0111] In order to insert a GC confirmation sequence downstream of the pseudogene region of chicken Igλ, a targeting vector as shown in FIG. 2 was produced. Methods for preparing individual parts will be described below.

### (1) Sequence for Confirmation of GC

[0112] Based on the variable region of human Igλ cloned in 1-1 above, a mutant sequence, in which 3 nucleotides were inserted into each CDR, and a mutant sequence, in which 3 nucleotides were deleted from each CDR, were designed, and these mutant sequences were then ligated to each other using the untranslated region sequence of a chicken Igλ pseudogene region to synthesize a sequence for confirmation of GC (SEQ ID NO: 17).

### (2) Construction of Targeting Vector

[0113] The sequence for confirmation of GC was incorporated into the KI-C-IN vector prepared in 1-2 above to have the structure shown in FIG. 2, so as to obtain a KI-C-IN-C vector. The gene sequence of this vector is shown in SEQ ID NO: 23.

### 1-4. Deletion of Pseudogene Region of Chicken Antibody Light Chain (Igλ) (KI-C-DE Vector)

[0114] In order to delete the pseudogene region of chicken Igλ, a targeting vector as shown in FIG. 3 was produced. Methods for preparing individual parts will be described below.

### (1) Left Arm

[0115] The genomic DNA of DT40 was used as a template, and an approximately 3.0-kb region located upstream of pV25 was amplified by PCR using a sense primer (CGCTTTGTACGAACGTTGTCACGT) (SEQ ID NO: 24) and an antisense primer (TACCTGAAGGTCTCTTTGTGTTTTG) (SEQ ID NO: 25), and it was then cloned into the pCR4blunt-TOPO to obtain Left Arm shown in SEQ ID NO: 26.

### (2) Right Arm

[0116] The same Right Arm as that prepared in 1-2 above was used.

### (3) Construction of Targeting Vector

[0117] The above-described Left Arm, neomycin resistance gene, and Right Arm were incorporated into the pCR4blunt-TOPO to have the structure shown in FIG. 3, so as to obtain a KI-C-DE vector. The gene sequence of this vector is shown in SEQ ID NO: 27.

1-5. Replacement of Pseudogene Region of Chicken Antibody Light Chain (Igλ) with Sequence for Confirmation of GC (KI-C-DE-C Vector)

[0118] In order to replace the pseudogene region of chicken Igλ with a sequence for confirmation of GC, a targeting vector as shown in FIG. 3 was produced. Methods for preparing individual parts will be described below.

### (1) GC Confirmation Sequence

[0119] The GC confirmation sequence prepared in 1-2 above was used.

### (2) Construction of Targeting Vector

[0120] The above-described GC confirmation sequence was incorporated into the KI-C-DE vector produced in 1-3 above to have the structure shown in FIG. 3, so as to obtain a KI-C-DE-C vector. The gene sequence of this vector is shown in SEQ ID NO: 28.

1-6. Knocking-in into Constant Region and Variable Region of Chicken Antibody Heavy Chain (IgM)

[0121] In order to substitute a region ranging from the variable region of chicken IgM (IgM) to the constant region μ1 thereof with a human antibody heavy chain (IgG₁), a targeting vector as shown in FIG. 4 was produced. Methods for preparing individual parts will be described below.

### (1) Human IgG₁ Constant Region

[0122] Among sequences obtained by subjecting human genome chromosome 14 32.33 comprising human IgG₁ to shotgun sequencing, a sequence corresponding to IgG₁ was obtained (Accession No.: NW 001838121.1). The sequences of CH1 corresponding to the “C region” of “IGH1,” a hinge, CH2, CH3 and a transmembrane domain were extracted from a sequence between the nucleotide 41520 and the nucleotide 43117, and a sequence was then designed by replacing the intron with a mouse IgG₂ₐ-derived sequence. Thereafter, a human IgG₁ constant region sequence (SEQ ID NO: 29) was obtained by synthesis.

### (2) Human IgG₁ Variable Region

[0123] Based on the sequence of a human germ cell-derived IgG₁ variable region gene, a sequence was designed by ligating VH3-23, D5-12, and JH1 sequences to one another, and a chicken-derived secretory signal sequence or splicing signal sequence was then added to the sequence to prepare a human IgG₁ variable region (SEQ ID NO: 30).

### (3) Left Arm

[0124] The genomic DNA of DT40 was used as a template, and a region ranging from a region upstream of a chicken IgM variable region to the variable region was amplified by PCR using a sense primer (TTCCCGAAGCGAAAGCCGCGT) (SEQ ID NO: 31) and an antisense primer (ACTCACCGGAGGAGACGATGA) (SEQ ID NO: 32), and an approximately 4.1-kbp fragment was then cloned, so as to obtain pCR4 Blunt-TOPO-cIgM-HC pV1 genome. Based on this sequence, Left Arm (SEQ ID NO: 33), to the 3′ terminal side of which a Vlox sequence was added, was designed and synthesized.

### (4) Center Arm 1

[0125] Based on the approximately 4.1-kbp sequence ranging from the region upstream of the chicken IgM variable region to the variable region, which had been cloned upon the above-described cloning of the Left Arm, Center Arm 1 corresponding to an approximately 1.4-kbp region upstream of the chicken IgM variable region was synthesized (SEQ ID NO: 34).

### (5) Center Arm 2

[0126] The genomic DNA of DT40 was used as a template, and an approximately 4.3-kbp region located downstream of the chicken IgM variable region was amplified by PCR using a sense primer (GGGGATCCTGGGTCAGTCGAAGGGGGCG) (SEQ ID NO: 35) and an antisense primer (GTGCGGCCGCCAAAAGCGGTAAAATCCACCC) (SEQ ID NO: 36), and it was then cloned, so as to obtain Center Arm 2 shown in SEQ ID NO: 37.

### (6) Right Arm

[0127] The genomic DNA of DT40 was used as a template, and an approximately 0.9-kbp region comprising a chicken IgM constant region μ2 was amplified by PCR using a sense primer (CCAAACCACCTCCTGGTGTCC) (SEQ ID NO: 38) and an antisense primer (CAAACCAAAACTACGGATTCTCTGACC) (SEQ ID NO: 39), and it was then cloned, so as to obtain Right Arm shown in SEQ ID NO: 40.

### (7) Construction of Targeting Vector

[0128] The above-described Left Arm, multi-cloning site, Center Arm1, human IgG₁ variable region, blasticidin resistance gene, Center Arm 2, human IgG₁ constant region, neomycin resistance gene, and Right Arm were incorporated into pBluescript to have the structure shown in FIG. 4, so as to obtain a human HC V-C vector. The gene sequence of this vector is shown in SEQ ID NO: 41.

1-7. Knocking-in into Constant Region, Variable Region, and Pseudogene Region of Chicken Antibody Heavy Chain (IgM) (Human HC KI Vector)

[0129] In order to insert a sequence for confirming gene conversion (a GC confirmation sequence; a human pseudogene consisting of a human Igγ variable region-derived sequence), a human IgG₁ variable region, and a human IgG₁ constant region into a region ranging from a region downstream of the pseudogene region of chicken IgM to a constant region μ1 thereof, a targeting vector as shown in FIG. 4 was produced. Methods for preparing individual parts will be described below.

### (1) Human IgG₁ Constant Region

[0130] The human IgG₁ constant region sequence described in 1-6 above was used.

### (2) Human IgG₁ Variable Region

[0131] The human IgG₁ variable region described in 1-6 above was used.

### (3) Sequence for Confirming Gene Conversion

[0132] Based on the variable region of human Igγ designed in 1-6 above, a mutant sequence was designed by deleting one nucleotide from CDR1, another mutant sequence was designed by deleting two nucleotides from CDR2, and another mutant sequence was designed by inserting one nucleotide into CDR3. These mutant sequences were ligated to one another using the untranslated region sequence of a chicken Igγ pseudogene region to synthesize a GC confirmation sequence (SEQ ID NO: 42).

### (4) Left Arm

[0133] The Left Arm described in 1-6 above was used.

### (5) Center Arm 1

[0134] The Center Arm 1 described in 1-6 above was used.

### (6) Center Arm 2

[0135] The Center Arm 2 described in 1-6 above was used.

### (7) Right Arm

[0136] The Right Arm described in 1-6 above was used.

### (8) Construction of Targeting Vector

[0137] The above-described Left Arm, GC confirmation sequence, Center Arm 1, human IgG₁ variable region, blasticidin resistance gene, Center Arm 2, human IgG₁ constant region, neomycin resistance gene, and Right Arm were incorporated into pBluescript to have the structure shown in FIG. 4, so as to obtain a human HC KI vector. The gene sequence of this vector is shown in SEQ ID NO: 43.

### 1-8. Construction of Vector for Expressing Cre Recombinase

[0138] Since a drug resistance gene has been incorporated into the above-produced vector in such a form that loxP sequences have been added to both ends of the gene, Cre recombinase is allowed to act on the vector after completion of the gene transfer, so that this gene can be removed. Hence, a Cre recombinase gene shown in SEQ ID NO: 44 was incorporated into pEGFP-C1 (BD Bioscience, #6084-1) to produce Cre EGFP-C1 shown in SEQ ID NO: 45.

2. Production of Cell Lines into Light Chain of which Human Sequence has been Inserted or Substituted

[0139] As a host, DT40, a cell line derived from chicken B cells, was used. The DT40 was cultured by the following method.

[0140] Using a CO₂ thermostatic chamber, the cells were cultured at 39.5° C. in the presence of 5% CO₂. IMDM (Life Technologies) was used as a medium, and 9% FBS, 1% chicken serum, 100 units/mL penicillin, 100 μg/mL streptomycin, and 50 μM monothioglycerol were added to the medium, and the thus obtained medium was then used. Hereinafter, unless otherwise specified, the “medium” indicates a medium having the aforementioned composition.

[0141] In order to evaluate gene conversion in a light chain, five types of cell lines shown in the following Table 1 were prepared.

TABLE 1

| | Light chain | | | |
|---|---|---|---|---|
| | Pseudogene region | | | |
| | | Sequence for | | |
| | Chicken- | verification | | |
| | derived | of genetic | Variable | Constant |
| Cell line | sequence | recombination | region | region |
| Wild type | Yes | No | Chicken | Chicken |
| LP1 | Yes | No | Human | Human |
| LP9 | Yes | Yes | Human | Human |
| LP18 | No | No | Human | Human |
| LP20 | No | Yes | Human | Human |

[0142] Methods for producing these cell lines will be described below.

2-1. Production of Cell Lines in which Variable Region and Constant Region have been Replaced with Human-Type Regions

[0143] The human LC KI vector produced in 1-1 above was linearized with the restriction enzyme NotI, and it was then introduced into DT40 cells by electroporation. The resulting cells were cultured in a medium, to which 2 mg/mL G418 and 10 μg/mL blasticidin had been added, for 7 to 10 days. Thereafter, the growing cells were subjected to genotyping by PCR, and a cell line in which gene substitution had occurred in a gene locus of interest was selected. The Cre_pEGFP-C1 produced in 1-8 above was introduced into the selected cell line, and the resulting cell line was then subjected to single cell sorting by flow cytometry, so as to select GFP-positive cells. Thereafter, the GFP-positive cells were subjected to genotyping by PCR, so as to obtain a cell line 37-3, in which the removal of the drug resistance genes could be confirmed. Thereafter, the KI-C-IN vector produced in 1-2 above was linearized with the restriction enzyme NotI, and it was then introduced into the cell line 37-3. The cells were cultured in a medium, to which 2 mg/mL G418 had been added, for 7 to 10 days. Thereafter, the growing cells were subjected to genotyping by PCR, so as to obtain a cell line LP1, in which gene insertion had occurred in a gene locus of interest (FIG. 5).

2-2. Production of Cell Line in which Variable Region and Constant Region have been Replaced with Human-Type Regions, and Further, in which Sequence for Confirming Gene Conversion (GC Sequence) has been Inserted Downstream of Chicken Pseudogene Region

[0144] The KI-C-IN-C vector produced in 1-3 above was linearized with the restriction enzyme NotI, and it was then introduced into the cell line 37-3 obtained in the above section. The resulting cells were cultured in a medium, to which 2 mg/mL G418 had been added, for 7 to 10 days. Thereafter, the growing cells were subjected to genotyping by PCR, so as to obtain a cell line LP9, in which gene insertion had occurred in a gene locus of interest (FIG. 6).

2-3. Production of Cell Line in which Variable Region and Constant Region have been Replaced with Human-Type Regions, and Further, in which Chicken Pseudogene Region has been Deleted

[0145] The KI-C-DE vector produced in 1-4 above was linearized with the restriction enzyme NotI, and it was then introduced into the cell line 37-3 obtained in 2-1 above. The resulting cells were cultured in a medium, to which 2 mg/mL G418 had been added, for 7 to 10 days. Thereafter, the growing cells were subjected to genotyping by PCR, so as to obtain a cell line LP18, in which gene insertion had occurred in a gene locus of interest (FIG. 7).

2-4. Production of Cell Line in which Variable Region and Constant Region have been Replaced with Human-Type Regions, and Further, in which Chicken Pseudogene Region has been Replaced with Sequence for Confirming Gene Conversion (GC Sequence)

[0146] The KI-C-DE-C vector produced in 1-5 above was linearized with the restriction enzyme NotI, and it was then introduced into the cell line 37-3 obtained in 2-1 above. The resulting cells were cultured in a medium, to which 2 mg/mL G418 had been added, for 7 to 10 days. Thereafter, the growing cells were subjected to genotyping by PCR, so as to obtain a cell line LP20, in which gene substitution had occurred in a gene locus of interest (FIG. 8).

### 3. Confirmation of Antibody Expression (Flow Cytometry and ELISA)

### 3-1. Analysis by Flow Cytometry

[0147] An antibody expressing on the surface of cells of each of the cell lines produced in 2 above was analyzed. Each cell line was cultured, and the cultured cells were then dispensed on a 96-well plate (Nunc, 249662) in an amount of 5×10⁵ cells/well. The cells were washed with 150 μL of FACS buffer (PBS containing 0.3% bovine serum albumin (BSA)) twice, and 50 μL of a primary antibody solution, which had been prepared by diluting Goat anti-Chicken IgM-FITC conjugate (Bethyl, A30-102F-20), Goat Anti-Human IgG (Gamma chain specific) R-PE conjugate (Southern biotech, A2040-09) or Goat Anti-human lambda PE conjugate (Southern biotech, 2070-09) with FACS buffer, 1000 times, 500 times, and 500 times, respectively, was added to the resulting cells. The mixture was incubated on ice in a dark place for 30 minutes, and it was then washed with 150 μL of FACS buffer twice. Thereafter, 200 μL of a PI solution, which had been 1000 times diluted with FACS buffer, was added to the reaction mixture, and was then suspended therein. This suspension was subjected to a flow cytometric analysis, and the expression of chicken IgM and human Igγ (heavy chain) or human Igλ (light chain) was analyzed. As a result, it was confirmed that, as shown in FIG. 9, only chicken IgM was expressed in wild-type DT40, whereas chicken IgM and human Igγ were expressed in the transformed cell lines LP1, LP9, LP18, and LP20. In all of the cell lines, the expression of Igγ that had not undergone gene transfer was not observed.

### 3-2. Analysis by ELISA

[0148] The concentrations of chicken IgM and human IgG₁, which were secreted from the cells produced in 2 above into culture supernatants, were measured. Individual cell lines were suspended in a medium containing no chicken serum to a concentration of 4×10⁵ cells/mL, and 2 mL each of the suspension was then plated on each well of a 24-well plate, followed by performing a culture for 3 days. Thereafter, the culture solution was recovered, was then filtrated through a 0.22-μm filter, and was then used in the measurement.

[0149] The method of measuring IgG is as follows. 20 μL of 1.0 μg/mL Goat anti-Human IgG-Fc affinity purified (Bethyl, A80-104A) was dispensed into an immuno 384-well plate Maxisorp (Nunc, 464718), and it was then reacted at room temperature for 1 hour or more, so that it was immobilized on the plate. Thereafter, the resultant on the plate was washed with a washing solution (PBS containing 0.05% Tween 20) five times, 50 μL of a blocking solution (PBS containing 1% BSA) was then added thereto, and the mixture was then reacted at room temperature for 30 minutes. Thereafter, the reaction mixture was washed with a washing solution five times, 20 μL of a measurement sample or Human IgG1 Lambda-UNLB (Southern Biotech, 0151L-01) serving as a standard substance was then added thereto, and the obtained mixture was then reacted at room temperature for 1 hour. Thereafter, the reaction mixture was washed with a washing solution five times, 20 μL of Goat anti-Human IgG-Fc HRP conjugated (Bethyl, A80-104P), which had been 1000 times diluted with PBS containing 1% BSA and 0.05% Tween 20, was then added thereto, and the obtained mixture was then reacted at room temperature for 1 hour. Thereafter, the reaction mixture was washed with a washing solution five times, 20 μL of TMB+(Dako, S159985) was then added thereto, and the obtained mixture was subjected to a coloring reaction at room temperature for 3 minutes. Subsequently, 20 μL of 1 N sulfuric acid was added to the reaction mixture to termination the reaction. Using Infinite M1000 (TECAN), the absorbance at 450 nm was measured.

[0150] For the measurement of IgM, the system of AlphaLISA Immunoassay (Perkin Elmer) was used. Goat anti-chicken IgM antibody (Bethyl, A30-102A) was labeled with biotin, employing Chromalink™ Biotin Labeling Reagent (SoluLink Inc., #B1001-105), so that a biotinylated antibody was prepared. Subsequently, Goat anti-chicken IgM antibody (Bethyl, A30-102A) was allowed to bind to Unconjugated AlphaLISA Acceptor Beads (Perkin Elmer), so that antibody-bound Alpha Screen beads were prepared. These biotin-labeled antibody and antibody-bound Alpha Screen beads were each diluted with an assay buffer (PBS containing 1% BSA) to concentrations of 4.5 nM and 50 μg/mL, respectively. Thereafter, they were mixed with each other in equal amounts, so as to prepare a chicken IgM concentration measurement solution. 20 μL of the chicken IgM concentration measurement solution was mixed with 5 μL of a measurement sample or the chicken serum (GIBCO, 16110) serving as a standard substance on a 96-well plate (Nunc), and the mixed solution was then dispensed into Alpha Plate-384 (Perkin Elmer) in an amount of 12.5 μL each. The mixed solution was reacted at room temperature for 60 minutes, and thereafter, 12.5 μL of AlphaScreen Streptavidin Donor Beads (Perkin Elmer), which had been adjusted to a concentration of 80 μg/mL with an assay buffer, was added to the reaction solution, and the obtained mixture was then reacted at room temperature under light shielding conditions for 30 minutes. Thereafter, using EnSpire (Perkin Elmer), an analysis was carried out.

[0151] The measurement results are shown in Table 2. It was confirmed that, as with the wild-type DT40, chicken IgM was secreted also in the transformed cell lines LP1, LP9, LP18 and LP20.

TABLE 2

| Cell line | IgG (μg/mL) | IgM (μg/mL) |
|---|---|---|
| Wild type | <0.01 | 2.30 |
| LP1 | <0.01 | 0.09 |
| LP9 | <0.01 | 0.10 |
| LP18 | <0.01 | 0.09 |
| LP20 | <0.01 | 0.03 |

### 4. Confirmation of Gene Conversion

[0152] The cell lines, in which the expression of human Igλ (light chain) had been confirmed in 3 above, were cultured in a medium containing 2.5 ng/mL TSA for 20 days, and genomic DNA was then extracted from 1×10⁶ cells. This genomic DNA was used as a template, and a light chain variable region was amplified by PCR using a sense primer to which a recognition sequence had been added (CGTATCGCCTCCCTCGCGCCATCAGNNNNNNNNNNCAGGTTCCCTGGTGCAGGC) (SEQ ID NO: 46), and an antisense primer (CTATGCGCCTTGCCAGCCCGCTCAGGCTTGGTCCCTCCGCCGAA) (SEQ ID NO: 47). Thereafter, the resultant was purified by agarose gel extraction, and was then concentrated using QIAGEN PCR Purification Kit (QIAGEN). Using the Next-Generation Sequencing Analysis System of Roche Diagnostics, the sequence of this sample was analyzed, and the presence or absence of gene conversion was evaluated based on whether or not a gene sequence identical to the inserted human pseudogene sequence would be present in the variable region. The results are shown in Table 3. It was confirmed that gene conversion had not occurred in LP1 and LP18 that did not comprise the human pseudogene sequence, whereas such gene conversion had occurred in LP9 and LP20 having the human pseudogene sequence.

TABLE 3

| | | Number of sequences | |
|---|---|---|---|
| | | with genetic | |
| Cell line | Number of sequences | recombination | Frequency |
| LP1 | 785 | 0 | 0.0% |
| LP9 | 344 | 18 | 5.2% |
| LP18 | 378 | 0 | 0.0% |
| LP20 | 634 | 31 | 4.9% |

5. Production of Cell Line, in which Human Sequence has been Inserted and/or Substituted into Heavy Chain

[0153] In order to evaluate gene conversion in a heavy chain, the three types of cell lines shown in Table 4 were prepared.

TABLE 4

| | Heavy chain | | | |
|---|---|---|---|---|
| | Pseudogene region | | | |
| | | Sequence for | | |
| | Chicken- | verification | | |
| | derived | of genetic | Variable | Constant |
| Cell line | sequence | recombination | region | region |
| Wild type | Yes | No | Chicken | Chicken |
| T18 | Yes | No | Human | Human |
| T11, T12 | Yes | Yes | Human | Human |

[0154] Methods for producing these cell lines will be described below.

5-1. Production of Cell Line in which Variable Region and Constant Region of Heavy Chain have been Replaced with Human-Type Regions

[0155] The human HC V-C vector produced in 1-6 above was linearized with the restriction enzyme Sail, and it was then introduced into the cell line 37-3 obtained in 2-2 above. The resulting cells were cultured in a medium, to which 2 mg/mL G418 and 10 μg/mL blasticidin had been added, for 7 to 10 days. Thereafter, the growing cells were subjected to genotyping by PCR, and a cell line T18 in which gene substitution had occurred in a gene locus of interest was obtained (FIG. 10).

5-2. Production of Cell Line in which Variable Region and Constant Region of Heavy Chain have been Replaced with Human-Type Regions, and Sequence for Confirming Gene Conversion (GC Confirmation Sequence) has been Inserted Downstream of Pseudogene Region

[0156] The human HC KI vector produced in 1-7 above was linearized with the restriction enzyme Sail, and it was then introduced into the cell line 37-3 obtained in 2-2 above. The resulting cells were cultured in a medium, to which 2 mg/mL G418 and 10 μg/mL blasticidin had been added, for 7 to 10 days. Thereafter, the growing cells were subjected to genotyping by PCR, and cell lines T11 and T12, in which gene substitution had occurred in a gene locus of interest was obtained (FIG. 11).

### 6. Confirmation of Antibody Expression (Flow Cytometry and ELISA)

### 6-1. Analysis by Flow Cytometry

[0157] Based on the method described in 3-1 above, the expression of an antibody in the cells produced in 5 above was confirmed. The results are shown in FIG. 12. It was confirmed that only chicken IgM was expressed in wild-type DT40, whereas the expression of chicken IgM disappeared and instead, human Igγ and Igλ were expressed in the transformed cell lines T18, T11 and T12.

### 6-2. Analysis by ELISA

[0158] Based on the method described in 3-2 above, the antibodies secreted from the cells produced in 5 above into a culture supernatant were measured. The results are shown in Table 5. As with 6-1 above, it was confirmed that only chicken IgM was secreted from wild-type DT40, whereas human IgG₁ was secreted from T18, T11 and T12, into which human IgG₁ had been introduced.

TABLE 5

| Cell line | IgG (μg/mL) | IgM (μg/mL) |
|---|---|---|
| Wild type | <0.01 | 2.30 |
| T18 | 1.00 | 0.03 |
| T11 | 0.40 | <0.01 |
| T12 | 0.69 | <0.01 |

### 7. Confirmation of Gene Conversion

[0159] Using the cell lines in which the expression of an antibody had been confirmed in 6 above, gene conversion was confirmed. The genomic DNA extracted by the method described in 4 above was used as a template, and a heavy chain variable region was amplified by PCR using a sense primer (CTATGCGCCTTGCCAGCCCGCTCAGTCCGTCAGCGCTCTCT) (SEQ ID NO: 48) and an antisense primer to which an identification tag had been added (CGTATCGCCTCCCTCGCGCC ATCAGNNNNNNNNNNCGGTGACCAGGGTGCCCTG) (SEQ ID NO: 49). Thereafter, a sequence analysis was carried out based on the method described in 4 above. The results are shown in Table 6. It was confirmed that gene conversion had not occurred at all in T18 containing no human pseudogenes, whereas such gene conversion had occurred in T11 and T12 having such a human pseudogene sequence.

TABLE 6

| | | Number of sequences | |
|---|---|---|---|
| | | with genetic | |
| Cell line | Number of sequences | recombination | Frequency |
| T18 | 1125 | 0 | 0.0% |
| T11 | 3038 | 415 | 13.4% |
| T12 | 4108 | 305 | 7.4% |

Production of L5/H5 Cell Line, in which Pseudogene Region Consisting of Five Human Variable Region-Derived Sequences has been Inserted into Each of Light Chain and Heavy Chain

### 8. Production of Vectors

[0160] 8-1. Knocking-in into Chicken Antibody (Igλ) Pseudogene Region

[0161] In order to substitute the pseudogene region of chicken Igλ with a pseudogene consisting of a sequence derived from the variable region of human Igλ (a human light chain pseudogene), a targeting vector as shown in FIG. 13 was produced. The production method will be described below.

(1) Designing and Production of Human Antibody Light Chain Pseudogene Sequence (pVL5)

[0162] Based on the gene sequences of immunoglobulin λ light chain variable regions, which had not caused V(D)J recombination in the human genome in the database, five sequences were selected from each of CDR1, CDR2 and CDR3, and the framework sequence of the Igλ variable region cloned in 1-1 above was then combined therewith, so as to design five sequences, namely, pVL001 (SEQ ID NO: 69), pVL002 (SEQ ID NO: 70), pVL003 (SEQ ID NO: 71), pVL004 (SEQ ID NO: 72) and pVL005 (SEQ ID NO: 73). Thereafter, a human light chain pseudogene sequence pVL5 (SEQ ID NO: 50) comprising these sequences was designed, and was then subjected to gene synthesis.

### (2) Production of Targeting Vector

[0163] On the basis of the KI-C-DE vector produced in 1-4 above, the GC confirmation sequence was replaced with the human antibody light chain pseudogene sequence pVL5 described in the above section to produce a human LCpV KI vector. The gene sequence of this vector is shown in SEQ ID NO: 51.

### 8-2. Substitution of Chicken Antibody Heavy Chain (IgM) Constant Region

[0164] In order to substitute the heavy chain constant region of chicken IgM with human IgG₁, a targeting vector as shown in FIG. 14 was produced. The production method will be described below.

### (1) Human IgG₁ Constant Region

[0165] The human IgG₁ constant region produced in 1-6 above was used.

### (2) Left Arm

[0166] The Center Arm 2 produced in 1-6 above was used.

### (3) Right Arm

[0167] The Right Arm produced in 1-6 above was used.

### (4) Production of Targeting Vector

[0168] The above-described Left Arm, human IgG₁ constant region sequence, neomycin resistance gene, and Right Arm were incorporated into pBluescript to produce a human CH KI vector. The gene sequence of this vector is shown in SEQ ID NO: 52.

8-3. Insertion into Chicken IgM Variable and Pseudogene Regions

### (1) Human IgG₁ Variable Region

[0169] The human IgG₁ variable region produced in 1-6 above was used.

(2) Designing and Production of Human Antibody Heavy Chain Pseudogene Sequence (pVH5)

[0170] Based on the sequences of human immunoglobulin heavy chain variable regions in the database, five sequences were selected from each of CDR1, CDR2 and CDR3, and the framework sequence of the variable region cloned in 1-6 above was then combined therewith, so as to design five sequences, namely, pVH001 (SEQ ID NO: 89), pVH002 (SEQ ID NO: 90), pVH003 (SEQ ID NO: 91), pVH004 (SEQ ID NO: 92) and pVH005 (SEQ ID NO: 93). Thereafter, a human antibody heavy chain pseudogene sequence pVH5 (SEQ ID NO: 53) comprising these sequences was designed, and was then subjected to gene synthesis.

### (3) Left Arm

[0171] The Left Arm produced in 1-6 above was used.

### (4) Center Arm

[0172] The Center Arm 1 produced in 1-6 above was used.

### (5) Right Arm

[0173] The Center Arm 2 produced in 1-6 above was used. The confirmed sequence of the Right Arm is shown in SEQ ID NO: 54.

### (6) Production of Targeting Vector

[0174] The above-described Left Arm, human antibody heavy chain pseudogene sequence pVH5, Center Arm, human IgG₁ variable region sequence, blasticidin resistance gene, and Right Arm were incorporated into pBluescript to obtain a human pVH VH KI vector. The gene sequence of this vector is shown in SEQ ID NO: 55.

9. Production of L5/H5 Cell Line, in which Five Human Pseudogenes have been Introduced into Each of Gene Loci of Chicken Antibody Light Chain and Heavy Chain

[0175] The human CH KI vector produced in 8-2 above, the human pVH VH KI vector produced in 8-3 above, and the human LC pV KI vector produced in 8-1 above were introduced into the cell line 37-3 obtained in 2-2 above, so as to produce a L5/H5 cell line (FIG. 15).

[0176] The human CH KI vector, which had been linearized with the restriction enzyme SalI, was introduced into the cell line 37-3, and the cells were then cultured in a medium containing 2 mg/mL G418. The growing cells were subjected to genotyping by PCR, so as to confirm that substitution had occurred in a gene locus of interest. Thereafter, Cre_pEGFP-C1 was introduced into the cells, and the resulting cells were then subjected to cell sorting to select GFP-positive cells. Thereafter, the selected cells were subjected to genotyping by PCR, so as to confirm that the drug resistance gene had been removed.

[0177] Subsequently, the human pVH VH KI vector, which had been linearized with the restriction enzyme SalI, was introduced into the cell line 37-3, and the cells were then cultured in a medium containing 10 μg/mL blasticidin. The growing cells were subjected to genotyping by PCR, so as to confirm that substitution had occurred in a gene locus of interest. Thereafter, Cre_pEGFP-C1 was introduced into the cells, and the resulting cells were then subjected to cell sorting to select GFP-positive cells. Thereafter, the selected cells were subjected to genotyping by PCR, so as to confirm that the drug resistance gene had been removed.

[0178] Finally, the human LC pV KI vector, which had been linearized with the restriction enzyme NotI, was introduced into the cell line 37-3, and the cells were then cultured in a medium containing 2 mg/mL G418. The growing cells were subjected to genotyping by PCR, so as to obtain cell lines B-B10 and J-D3, in each of which substitution had occurred in a gene locus of interest (FIG. 16 and FIG. 17).

### 10. Confirmation of Antibody Expression (Flow Cytometry and ELISA)

### 10-1. Analysis by Flow Cytometry

[0179] Based on the method described in 3-1 above, the expression of an antibody in the cells produced in 9 above was confirmed. The results are shown in FIG. 18. It was confirmed that only chicken IgM was expressed in wild-type DT40, whereas the expression of chicken IgM disappeared and instead, human Igγ and Igλ were expressed in the transformed cell lines B-B10 and J-D3.

### 10-2. Analysis of ELISA

[0180] Based on the method described in 3-2 above, the antibodies secreted from the cells produced in 9 above were measured. The results are shown in Table 7. As with 10-1 above, it was confirmed that only chicken IgM was secreted from wild-type DT40, whereas human IgG₁ was secreted from the transformed cell lines B-B10 and J-D3.

TABLE 7

| Cell line | IgG (μg/mL) | IgM (μg/mL) |
|---|---|---|
| Wild type | <0.01 | 2.55 |
| B-B10 | 2.19 | 0.01 |
| J-D3 | 3.45 | <0.01 |

### 11. Confirmation of Gene Conversion

[0181] Using the cell lines in which the expression of an antibody had been confirmed in 10 above, gene conversion was confirmed. The genomic DNA extracted from the cells, which had been cultured in the presence of TSA for 42 days, according to the method described in 4 above was used as a template, and a light chain variable region was amplified by PCR using a sense primer to which a recognition sequence had been added (CGTATCGCCTCCCTCGCGCCATCAGNNNNNNNNNNCAGGTTCCCTGGTGCAGGC) (SEQ ID NO: 46), and an antisense primer (CTATGCGCCTTGCCAGCCCGCTCAGGCTTGGTCCCTCCGCCGAA) (SEQ ID NO: 47), and a heavy chain variable region was amplified by PCR using a sense primer (CTATGCGCCTTGCCAGCCCGCTCAGTCCGTCAGCGCTCTCT) (SEQ ID NO: 56) and an antisense primer to which an identification tag had been added (CGTATCGCCTCCCTCGCGCCATCAGNNNNNNNNNNTGGGGGGGGTTCATATGAAG) (SEQ ID NO: 57). Thereafter, sequence analyses were carried out according to the method described in 4 above. The results obtained by analyzing the sequences of the light chain and heavy chain variable regions in the cell line B-B10 are shown in Table 8 and Table 9, respectively. A clone comprising the sequence derived from the inserted human pseudogene was confirmed in both of the light chain and heavy chain variable regions, and thus, it was demonstrated that a variety of sequences could be generated as a result of gene conversion. Moreover, it was also confirmed that a variety of sequences could be generated as a result of gene conversion even in the cell line J-D3.

TABLE 8

| # | % | CDR1 | CDR2 | CDR3 |
|---|---|---|---|---|
| 1 | 0.183 | VL | pVL003 | VL |
| 2 | 0.046 | Not matched | VL | pVL003 |
| 3 | 0.046 | VL | VL | pVL004 |

VL: sequence inserted into variable region
pVL001-005: sequences inserted into pseudogene region
Not matched: sequence that is not completely matched with either VL or pVL (which is probably caused by partial genetic recombination or mutation)

TABLE 9

| # | % | CDR1 | CDR2 | CDR3 |
|---|---|---|---|---|
| 1 | 11.176 | pVH004 | VH | VH |
| 2 | 0.131 | pVH001 | VH | VH |
| 3 | 0.131 | pVH004 | Not matched | VH |
| 4 | 0.065 | pVH003 | VH | VH |

VH: sequence inserted into variable region
pVH001-005: sequences inserted into pseudogene region
Not matched: sequence that is not completely matched with either VL or pVL (which is probably caused by partial genetic recombination or mutation)

Production of L15/H15 Cell Line, in which 15 Human Variable Region-Derived Sequences have been Inserted into Each of Chicken Antibody Light Chain and Heavy Chain Gene Loci

### 12. Production of Vectors

[0182] 12-1. Knocking-in into Chicken Antibody Light Chain (Igλ) Variable and Constant Regions

[0183] Based on the method described in 1-1 above, a targeting vector, Lambda-VL-CL KI vector 2.0, shown in FIG. 19 was produced.

(1) Variable region and constant region of human Igλ

[0184] The variable region and the constant region produced in 1-1 above were used.

### (2) Left Arm

[0185] The Left Arm produced in 1-1 above was used.

### (3) Center Arm

[0186] The Center Arm produced in 1-1 above was used.

### (4) Right Arm

[0187] Based on the sequence of a region downstream of the constant region of a chicken antibody light chain, which was determined in 1-1 above, Right Arm was synthesized.

### (5) Construction of Targeting Vector

[0188] The above-described Left Arm, human Igλ variable region, Center Arm, human Igλ constant region, and Right Arm were incorporated into pBluescript to have the structure shown in FIG. 19, so as to obtain Lambda-VL-CL KI vector 2.0 (SEQ ID NO: 58).

### 12-2. Knock-Out of Chicken Antibody Light Chain (Igλ) Pseudogene

### (1) Human Igλ Variable Region

[0189] The variable region sequence described in 1-1 above was used.

### (2) Left Arm

[0190] The Left Arm described in 1-2 above was used.

### (3) Center Arm

[0191] The Left Arm described in 1-1 above was used as Center Arm.

### (4) Right Arm

[0192] The Center Arm described in 1-1 above was used as Right Arm.

### (5) Multi-Cloning Site

[0193] For insertion of a human antibody light chain pseudogene sequence pVL15, a multi-cloning site shown in SEQ ID NO: 59 was designed.

### (6) Construction of Targeting Vector

[0194] The above-described Left Arm, neomycin resistance gene, multi-cloning site, Center Arm, human Igλ variable region, blasticidin resistance gene, and Right Arm were incorporated into pUC19, so as to construct a targeting vector pVL KI_pUC19_step5_BrRev (SEQ ID NO: 60), as shown in FIG. 19.

12-3. Knocking-in into Chicken Antibody Light Chain (Igλ) Pseudogene and Variable Regions
(1) Human Antibody Light Chain Pseudogene Sequence (pVL15)

[0195] Based on the sequences of human immunoglobulin k variable regions in the database, 15 CDR1, CDR2 and CDR3 sequences were selected, and the framework sequence of the human Igλ variable region cloned in 1-1 above were then combined therewith, so as to design 15 sequences, namely, pVL101 (SEQ ID NO: 74), pVL102 (SEQ ID NO: 75), pVL103 (SEQ ID NO: 76), pVL104 (SEQ ID NO: 77), pVL105 (SEQ ID NO: 78), pVL106 (SEQ ID NO: 79), pVL107 (SEQ ID NO: 80), pVL108 (SEQ ID NO: 81), pVL109 (SEQ ID NO: 82), pVL110 (SEQ ID NO: 83), pVL111 (SEQ ID NO: 84), pVL112 (SEQ ID NO: 85), pVL113 (SEQ ID NO: 86), pVL114 (SEQ ID NO: 87), and pVL115 (SEQ ID NO: 88). A human antibody light chain pseudogene sequence pVL15 (SEQ ID NO: 61) comprising these sequences was designed, and was then subjected to gene synthesis.

### (2) Construction of Targeting Vector

[0196] The above-described human antibody light chain pseudogene sequence pVL15 was incorporated into the multi-cloning site of the pVL KI_pUC19 step6 BrRev produced in 12-2 above, so as to construct a targeting vector pVL KI_pUC19_step6_BrRev_pVL#odd (SEQ ID NO: 62) as shown in FIG. 19.

12-4. Knocking-in into Chicken Antibody Heavy Chain (IgM) Constant Region

[0197] The human CH KI vector produced in 8-2 above was used.

12-5. Knocking-in into Chicken Antibody Heavy Chain (IgM) Variable Region

### (1) Human IgG₁ Variable Region

[0198] The variable region sequence described in 1-6 above was used.

### (2) Left Arm

[0199] The Center Arm described in 1-6 above was used.

### (3) Right Arm

[0200] The Right Arm described in 1-6 above was used.

### (4) Construction of Targeting Vector

[0201] The above-described Left Arm, human IgG₁ variable region, blasticidin resistance gene, and Right Arm were incorporated into pUC19, so as to produce a targeting vector H(X)0•hV(B)_074-009/No4 (SEQ ID NO: 63) as shown in FIG. 20.

12-6. Knocking-in into Chicken Antibody Heavy Chain (IgM) Pseudogene Region
(1) Human Antibody Heavy Chain Pseudogene Sequence (pVH15)

[0202] Based on the sequences of human immunoglobulin heavy chain variable regions in the database, 15 CDR1, CDR2 and CDR3 sequences were selected, and the framework sequence of the human IgG₁ variable region cloned in 1-6 above was then combined therewith, so as to design 15 sequences, namely, pVH101 (SEQ ID NO: 94), pVH102 (SEQ ID NO: 95), pVH103 (SEQ ID NO: 96), pVH104 (SEQ ID NO: 97), pVH105 (SEQ ID NO: 98), pVH106 (SEQ ID NO: 99), pVH107 (SEQ ID NO: 100), pVH108 (SEQ ID NO: 101), pVH109 (SEQ ID NO: 102), pVH110 (SEQ ID NO: 103), pVH111 (SEQ ID NO: 104), pVH112 (SEQ ID NO: 105), pVH113 (SEQ ID NO: 106), pVH114 (SEQ ID NO: 107), and pVH115 (SEQ ID NO: 108). Thereafter, a human antibody heavy chain pseudogene sequence pVH15 (SEQ ID NO: 64) was designed by ligating these sequences to one another, and was then subjected to gene synthesis.

### (2) Left Arm

[0203] The Left Arm described in 1-6 above was used.

### (3) Right Arm

[0204] The Center Arm described in 1-6 above was used.

### (4) Multi-Cloning Site

[0205] For insertion of the human antibody heavy chain pseudogene sequence, a multi-cloning site shown in SEQ ID NO: 65 was designed.

### (5) Site-Specific Recombination Using Cre Recombinase (RMCE Method)

[0206] It has been known that if a pseudogene sequence region is prolonged, the transduction efficiency of homologous recombination is reduced. Thus, in order to easily insert a pseudogene sequence using Cre recombinase, an RMCE method was applied. First, a cassette sequence for RMCE comprising a loxm3 rev sequence and a loxm7 rev RE sequence was designed.

### (6) Construction of Targeting Vector

[0207] The Left Arm, neomycin resistance gene, cassette sequence for RMCE, multi-cloning site, Right Arm, and human IgG₁ variable region were incorporated into pUC19, and thereafter, the human antibody heavy chain pseudogene region pVH15 was incorporated into the multi-cloning site, so as to produce a targeting vector pVH KI_pUC19_step3p_VH#odd_15pVH_RMCE (SEQ ID NO: 66) as shown in FIG. 20.

### 13. Production of Cell Lines

[0208] The Lambda-VL-CL KI vector 2.0 prepared in 12-1 above, the pVL KI_pUC19_step5_BrRev prepared in 12-2 above, the pVL KI_pUC19_step6_BrRev_pVL#odd prepared in 12-3 above, the human CH KI vector prepared in 12-4 above, the H(X)0•hV(B)_074-009/No4 prepared in 12-5 above, and the pVH KI_pUC19_step3_pVH#odd_15pVH_RMCE prepared in 12-6 above were each introduced into DT40 cells, so as to produce cell lines.

[0209] First, the human CH KI vector, which had been linearized with the restriction enzyme SalI, was introduced into the cells, and the obtained mixture was then cultured in a medium containing 2 mg/mL G418. Thereafter, the growing cells were subjected to genotyping by PCR, so as to confirm that substitution had occurred in a gene locus of interest. Thereafter, Cre_pEGFP-C1 was introduced into the cells, and the resulting cells were then subjected to cell sorting to select GFP-positive cells. Thereafter, the selected cells were subjected to genotyping by PCR, so as to confirm that the drug resistance gene had been removed.

[0210] Subsequently, the Lambda-VL-CL KI vector 2.0, which had been linearized with the restriction enzyme NotI was introduced into DT40, and the obtained mixture was then culture in a medium containing 10 μg/mL blasticidin. Thereafter, the growing cells were subjected to genotyping by PCR, so as to confirm that substitution had occurred in a gene locus of interest. Thereafter, Cre_pEGFP-C1 was introduced into the cells, and the resulting cells were then subjected to cell sorting to select GFP-positive cells. Thereafter, the selected cells were subjected to genotyping by PCR, so as to confirm that the drug resistance gene had been removed.

[0211] Thereafter, the pVL KI_pUC19_step5_BrRev, which had been linearized with the restriction enzyme NotI, was introduced into the cells, and the obtained mixture was then cultured in a medium containing 2 mg/mL G418 and 10 μg/mL blasticidin. Thereafter, the growing cells were subjected to genotyping by PCR, so as to confirm that substitution had occurred in a gene locus of interest. Thereafter, Cre_pEGFP-C1 was introduced into the cells, and the resulting cells were then subjected to cell sorting to select GFP-positive cells. Thereafter, the selected cells were subjected to genotyping by PCR, so as to confirm that the drug resistance genes had been removed.

[0212] Thereafter, the pVL KI_pUC19_step6_BrRev_pVL#odd, which had been linearized with the restriction enzyme NotI, was introduced into the cells, and the obtained mixture was then cultured in a medium containing 2 mg/mL G418 and 10 μg/mL blasticidin. Thereafter, the growing cells were subjected to genotyping by PCR, so as to confirm that substitution had occurred in a gene locus of interest. Thereafter, Cre_pEGFP-C1 was introduced into the cells, and the resulting cells were then subjected to cell sorting to select GFP-positive cells. Thereafter, the selected cells were subjected to genotyping by PCR, so as to confirm that the drug resistance genes had been removed.

[0213] Finally, the H(X)0•hV(B)_074-009/No4 linearized with the restriction enzyme ScaI and pVH KI_pUC19_step3_pVH#odd_15pVH_RMCE linearized with the restriction enzyme NotI were introduced into the cells, and the obtained mixture was then cultured in a medium containing 2 mg/mL G418 and 10 μg/mL blasticidin. Thereafter, the growing cells were subjected to genotyping by PCR, so as to confirm that substitution had occurred in a gene locus of interest. Thereafter, Cre_pEGFP-C1 was introduced into the cells, and the resulting cells were then subjected to cell sorting to select GFP-positive cells. Thereafter, the selected cells were subjected to genotyping by PCR, so as to obtain cell lines A12-3, A12-4, A12-5, B7-3, B7-9 and B7-11, from each of which the drug resistance genes had been removed.

### 14. Confirmation of Antibody Expression (Flow Cytometry and ELISA)

### 14-1. Analysis by Flow Cytometry

[0214] Based on the method described in 3 above, the expression of an antibody in the cells produced in 13 above was confirmed. The results are shown in FIG. 21 and FIG. 22. It was confirmed that only chicken IgM was expressed in wild-type DT40, whereas the expression of chicken IgM disappeared and instead, human Igγ and Igλ were expressed in the transformed cell lines A12-3, A12-4, A12-5, B7-3, B7-9 and B7-11 (FIGS. 21 and 22). It is to be noted that since the histogram of Igλ in A12-5 was incorrect in FIG. 21, FIG. 22 including correct data obtained before the priority date was attached herewith.

### 14-2. Analysis by ELISA

[0215] Based on the method described in 3-2 above, the antibodies secreted from the cells produced in 13 above were measured. The results are shown in Table 10. As with 10-1 above, it was confirmed that only chicken IgM was secreted from wild-type DT40, whereas human IgG₁ was secreted from the transformed cell lines A12-3, A12-4, A12-5, B7-3, B7-9 and B7-11.

TABLE 10

| Cell line | IgG (μg/mL) | IgM (μg/mL) |
|---|---|---|
| Wild type | <0.01 | 2.54 |
| A12-3 | 0.52 | <0.01 |
| A12-4 | 0.51 | <0.01 |
| A12-5 | 0.65 | 0.01 |
| B7-3 | 0.62 | 0.01 |
| B7-9 | 0.76 | 0.02 |
| B7-11 | 0.77 | 0.02 |

### 15. Confirmation of Gene Conversion

[0216] Using the cell lines in which the expression of an antibody had been confirmed in 10 above, gene conversion was confirmed. Using, as a template, the genomic DNA extracted from the cells, which had been cultured for 21 days or 42 days in the presence of TSA, by the method described in 4 above, a light chain variable region was amplified by PCR using a sense primer to which a recognition sequence had been added (CGTATCGCCTCCCTCGCGCCATCAGNNNNNNNNNNCAGGTTCCCTGGTGCAGGC) (SEQ ID NO: 46), and an antisense primer (CTATGCGCCTTGCCAGCCCGCTCAGGCTTGGTCCCTCCGCCGAA) (SEQ ID NO: 47), and a heavy chain variable region was amplified by PCR using a sense primer (CTATGCGCCTTGCCAGCCCGCTCAGTCCGTCAGCGCTCTCT) (SEQ ID NO: 56) and an antisense primer to which an identification tag had been added (CGTATCGCCTCCCTCGCGCCATCAGNNNNNNNNNNTGGGGGGGGTTCATATGAAG) (SEQ ID NO: 57). Thereafter, sequence analyses were carried out based on the method described in 4 above. The results of the sequence analysis performed on the variable regions of the light chain and heavy chain in the cell line B7-11 cultured in the presence of TSA for 21 days are shown in Table 11 and Table 12, respectively. The results (the top 10) of the sequence analysis performed on the variable regions of the light chain and heavy chain in the cell line B7-11 cultured in the presence of TSA for 42 days are shown in Table 13 and Table 14, respectively. A clone comprising a sequence derived from a human pseudogene was found in the variable regions of both of the light chain and the heavy chain, and it was demonstrated that a variety of sequences were generated as a result of gene conversion. In addition, it was also confirmed that a variety of sequences were generated as a result of gene conversion even in other cell lines.

TABLE 11

| # | % | CDR1 | CDR2 | CDR3 |
|---|---|---|---|---|
| 1 | 0.327 | VL | pVL103 | VL |
| 2 | 0.327 | VL | pVL102 | VL |
| 3 | 0.196 | VL | VL | pVL114 |
| 4 | 0.196 | VL | pVL105 | VL |
| 5 | 0.131 | VL | pVL104 | VL |
| 6 | 0.131 | VL | VL | pVL112 |
| 7 | 0.131 | pVL105 | VL | VL |
| 8 | 0.065 | VL | Not matched | pVL106 |
| 9 | 0.065 | VL | pVL109 | VL |
| 10 | 0.065 | VL | VL | pVL110 |
| 11 | 0.065 | VL | pVL107 | VL |

VL: sequence inserted into variable region
pVL101-115: sequences inserted into pseudogene region
Not matched: sequence that is not completely matched with either VL or pVL (which is probably caused by partial genetic recombination or mutation)

TABLE 12

| # | % | CDR1 | CDR2 | CDR3 |
|---|---|---|---|---|
| 1 | 0.46 | pVH105 | VH | VH |
| 2 | 0.345 | pVH108 | VH | VH |
| 3 | 0.345 | VH | pVH107 | Not matched |
| 4 | 0.345 | pVH107 | VH | VH |
| 5 | 0.345 | pVH111 | pVH111 | VH |
| 6 | 0.46 | pVH112 | Not matched | VH |
| 7 | 0.23 | pVH109 | VH | VH |
| 8 | 0.23 | VH | pVH112 | VH |
| 9 | 0.23 | pVH105 | Not matched | VH |
| 10 | 0.115 | pVH108 | pVH108 | VH |
| 11 | 0.115 | VH | VH | pVH113 |
| 12 | 0.115 | VH | VH | pVH109 |
| 13 | 0.115 | pVH107 | VH | Not matched |
| 14 | 0.115 | pVH103 | Not matched | VH |
| 15 | 0.23 | pVH111 | Not matched | VH |
| 16 | 0.23 | pVH111 | Not matched | Not matched |
| 17 | 0.115 | pVH111 | VH | VH |

VL: sequence inserted into variable region
pVL101-115: sequences inserted into pseudogene region
Not matched: sequence that is not completely matched with either VL or pVL (which is probably caused by partial genetic recombination or mutation)

TABLE 13

| # | % | CDR1 | CDR2 | CDR3 |
|---|---|---|---|---|
| 1 | 0.175 | VL | pVL109 | VL |
| 2 | 0.175 | pVL105 | VL | VL |
| 3 | 0.175 | pVL105 | pVL105 | VL |
| 4 | 0.116* | VL | pVL105 | VL |
| 5 | 0.116* | VL | pVL105 | VL |
| 6 | 0.116 | Not matched | pVL105 | VL |
| 7 | 0.058 | VL | pVL109 | Not matched |
| 8 | 0.058 | VL | VL | pVL114 |
| 9 | 0.058 | VL | pVL102 | VL |
| 10 | 0.058 | VL | pVL108 | VL |

VL: sequence inserted into variable region
pVL: sequence inserted into pseudogene region
Not matched: sequence that is not completely matched with either VL or pVL (which is probably caused by partial genetic recombination or mutation)
*Sequences of portions other than CDRs are different, respectively.

TABLE 14

| # | % | CDR1 | CDR2 | CDR3 |
|---|---|---|---|---|
| 1 | 1.789 | pVH108 | VH | VH |
| 2 | 1.022 | pVH112 | VH | VH |
| 3 | 0.681 | pVH109 | VH | VH |
| 4 | 0.596 | VH | pVH112 | VH |
| 5 | 0.596 | pVH111 | Not matched | VH |
| 6 | 0.511 | pVH107 | VH | VH |
| 7 | 0.426 | pVH111 | pVH111 | VH |
| 8 | 0.341 | pVH111 | VH | VH |
| 9 | 0.256 | pVH108 | pVH108 | VH |
| 10 | 0.256 | VH | pVH107 | Not matched |

VH: sequence inserted into variable region
pVH: sequence inserted into pseudogene region
Not matched: sequence that is not completely matched with either VH or pVH (which is probably caused by partial genetic recombination or mutation)

Production of L15/H30 Cell Line, in which 15 Pseudogene Regions Each Consisting of Human Variable Region-Derived Sequence have been Inserted into Light Chain and 30 Such Pseudogene Regions have been Inserted into Heavy Chain

### 16. Production of Vectors

[0217] 16-1. Knocking-in into Chicken Antibody Light Chain (Igλ) Variable and Constant Regions

[0218] The Lambda-VL-CL KI vector 2.0 produced in 12-1 above was used.

### 16-2. Knock-Out of Chicken Antibody Light Chain (Igλ) Pseudogene

[0219] The pVL KI_pUC19_step5_BrRev produced in 12-2 above was used.

16-3. Knocking-in into Chicken Antibody Light Chain (Igλ) Pseudogene and Variable Regions

[0220] The pVL KI_pUC19_step6_BrRev_pVL#odd produced in 12-3 above was used.

16-4. Knocking-in into Chicken Antibody Heavy Chain (IgM) Constant Region

[0221] The human CH KI vector produced in 8-2 above was used.

16-5. Knocking-in into Chicken Antibody Heavy Chain (IgM) Variable Region

### (1) Human IgG₁ Variable Region

[0222] The variable region sequence described in 1-6 above was used.

### (2) Left Arm

[0223] The Left Arm described in 1-6 above was used.

### (3) Center Arm

[0224] The Center Arm described in 1-6 above was used.

### (4) Right Arm

[0225] The Right Arm described in 1-6 above was used.

### (5) Cassette Sequence for RMCE

[0226] The cassette sequence for RMCE designed in 12-6 above was used.

### (6) Construction of Targeting Vector

[0227] The above-described Left Arm, neomycin resistance gene, cassette sequence for RMCE, Center Arm, human IgG₁ variable region, and Right Arm were incorporated into pUC19, so as to produce a targeting vector pVH KI_pUC19_step5_BsrRev_RMCE_cassette (SEQ ID NO: 109) as shown in FIG. 23.

16-6. Knocking-in into Chicken Antibody Heavy Chain (IgM) Pseudogene Region
(1) Human Antibody Heavy Chain Pseudogene Sequence (pVH30)

[0228] Based on the sequences of human immunoglobulin heavy chain variable regions in the database, 30 CDR1, CDR2 and CDR3 sequences were selected, and the framework sequence of the human IgG₁ variable region cloned in 1-6 above was then combined therewith, so as to design 30 sequences, namely, pVH101 (SEQ ID NO: 94), pVH102 (SEQ ID NO: 95), pVH103 (SEQ ID NO: 96), pVH104 (SEQ ID NO: 97), pVH105 (SEQ ID NO: 98), pVH106 (SEQ ID NO: 99), pVH107 (SEQ ID NO: 100), pVH108 (SEQ ID NO: 101), pVH109 (SEQ ID NO: 102), pVH110 (SEQ ID NO: 103), pVH111 (SEQ ID NO: 104), pVH112 (SEQ ID NO: 105), pVH113 (SEQ ID NO: 106), pVH114 (SEQ ID NO: 107), pVH115 (SEQ ID NO: 108), pVH116 (SEQ ID NO: 110), pVH117 (SEQ ID NO: 111), pVH118 (SEQ ID NO: 112), pVH119 (SEQ ID NO: 113), pVH120 (SEQ ID NO: 114), pVH121 (SEQ ID NO: 115), pVH122 (SEQ ID NO: 116), pVH123 (SEQ ID NO: 117), pVH124 (SEQ ID NO: 118), pVH125 (SEQ ID NO: 119), pVH126 (SEQ ID NO: 120), pVH127 (SEQ ID NO: 121), pVH128 (SEQ ID NO: 122), pVH129 (SEQ ID NO: 123), and pVH130 (SEQ ID NO: 124). Thereafter, a human antibody heavy chain pseudogene sequence pVH30 (SEQ ID NO: 125) was designed by ligating these sequences to one another, and was then subjected to gene synthesis.

### (2) Left Arm

[0229] The Left Arm described in 1-6 above was used.

### (3) Right Arm

[0230] The Right Arm described in 1-6 above was used.

### (4) Multi-Cloning Site

[0231] For insertion of the human antibody heavy chain pseudogene sequence, a multi-cloning site shown in SEQ ID NO: 65 was designed.

### (5) Construction of Targeting Vector

[0232] The Left Arm, neomycin resistance gene, multi-cloning site, Right Arm, human IgG₁ variable region were incorporated into pUC19, and thereafter, the human antibody heavy chain pseudogene region pVH30 was incorporated into the multi-cloning site, so as to produce a targeting vector pVH KI_pUC19_step3_pVH#odd_even (SEQ ID NO: 126) as shown in FIG. 24.

### 17. Production of Cell Lines

[0233] The Lambda-VL-CL KI vector 2.0 produced in 12-1 above, the pVL KI_pUC19_step5_BrRev produced in 12-2 above, the pVL KI_pUC19_step6_BrRev_pVL#odd produced in 12-3 above, the human CH KI vector produced in 12-4 above, the pVH KI_pUC19_step5_BsrRev_RMCE_cassette produced in 16-5 above, and the pVH KI_pUC19_step3_pVH#odd_even produced in 16-6 above were each introduced into DT40 cells, so as to produce cell lines.

[0234] First, the human CH KI vector, which had been linearized with the restriction enzyme SalI, was introduced into the cells, and the obtained mixture was then cultured in a medium containing 2 mg/mL G418. Thereafter, the growing cells were subjected to genotyping by PCR, so as to confirm that substitution had occurred in a gene locus of interest. Thereafter, Cre_pEGFP-C1 was introduced into the cells, and the resulting cells were then subjected to cell sorting to select GFP-positive cells. Thereafter, the selected cells were subjected to genotyping by PCR, so as to confirm that the drug resistance gene had been removed.

[0235] Subsequently, the Lambda-VL-CL KI vector 2.0, which had been linearized with the restriction enzyme NotI, was introduced into DT40 cells, and the obtained mixture was then cultured in a medium containing 10 μg/mL blasticidin. Thereafter, the growing cells were subjected to genotyping by PCR, so as to confirm that substitution had occurred in a gene locus of interest. Thereafter, Cre_pEGFP-C1 was introduced into the cells, and the resulting cells were then subjected to cell sorting to select GFP-positive cells. Thereafter, the selected cells were subjected to genotyping by PCR, so as to confirm that the drug resistance gene had been removed.

[0236] Thereafter, the pVL KI_pUC19_step5_BrRev, which had been linearized with the restriction enzyme NotI, was introduced into the cells, and the obtained mixture was then cultured in a medium containing 2 mg/mL G418 and 10 μg/mL blasticidin. Thereafter, the growing cells were subjected to genotyping by PCR, so as to confirm that substitution had occurred in a gene locus of interest. Thereafter, Cre_pEGFP-C1 was introduced into the cells, and the resulting cells were then subjected to cell sorting to select GFP-positive cells. Thereafter, the selected cells were subjected to genotyping by PCR, so as to confirm that the drug resistance genes had been removed.

[0237] Thereafter, the pVL KI_pUC19_step6_BrRev_pVL#odd, which had been linearized with the restriction enzyme NotI, was introduced into the cells, and the obtained mixture was then cultured in a medium containing 2 mg/mL G418 and 10 μg/mL blasticidin. Thereafter, the growing cells were subjected to genotyping by PCR, so as to confirm that substitution had occurred in a gene locus of interest. Thereafter, Cre_pEGFP-C1 was introduced into the cells, and the resulting cells were then subjected to cell sorting to select GFP-positive cells. Thereafter, the selected cells were subjected to genotyping by PCR, so as to confirm that the drug resistance genes had been removed.

[0238] Further, the pVH KI_pUC19_step5_BsrRev_RMCE_cassette, which had been linearized with the restriction enzyme NotI, was introduced into the cells, and the obtained mixture was then cultured in a medium containing 2 mg/mL G418 and 10 μg/mL blasticidin. Thereafter, the growing cells were subjected to genotyping by PCR, so as to confirm that substitution had occurred in a gene locus of interest. Thereafter, Cre_pEGFP-C1 was introduced into the cells, and the resulting cells were then subjected to cell sorting to select GFP-positive cells. Thereafter, the selected cells were subjected to genotyping by PCR, so as to confirm that the drug resistance genes had been removed.

[0239] Finally, the pVH KI_pUC19_step3_pVH#odd_even, which had been linearized with the restriction enzyme NotI, was introduced into the cells, and the obtained mixture was then cultured in a medium containing 2 mg/mL G418. Thereafter, the growing cells were subjected to genotyping by PCR, so as to confirm that substitution had occurred in a gene locus of interest. Thereafter, Cre_pEGFP-C1 was introduced into the cells, and the resulting cells were then subjected to cell sorting to select GFP-positive cells. Thereafter, the selected cells were subjected to genotyping by PCR, so as to obtain cell lines #7-7, #11-3 and #11-6, from each of which the drug resistance gene had been removed.

### 18. Confirmation of Antibody Expression (Flow Cytometry and ELISA)

### 18-1. Analysis by Flow Cytometry

[0240] Based on the method described in 3 above, the expression of an antibody in the cells produced in 16 above was confirmed. The results are shown in FIG. 25. It was confirmed that only chicken IgM was expressed in wild-type DT40, whereas the expression of chicken IgM disappeared and instead, human Igγ and Igλ were expressed in the transformed cell lines #7-7, #11-3 and #11-6 (FIG. 25).

### 18-2. Analysis by ELISA

[0241] The antibodies secreted from the cells produced in 17 above were measured. The measurement of human IgG was carried out based on the method described in 3-2 above. The method for measuring chicken IgM is as follows.

[0242] That is, 20 μL of 1.0 μg/mL Goat anti-chicken IgM (Bethyl, A30-102A) was dispensed on an immuno 384-well plate Maxisorp (Nunc, 464718), and it was then reacted at room temperature for 1 hour or more, so that it was immobilized on the plate. Thereafter, the resultant was washed with a washing solution (PBS containing 0.05% Tween 20) five times, and 50 μL of a blocking solution (PBS containing 1% BSA) was then added thereto. The obtained mixture was reacted at room temperature for 30 minutes. Thereafter, the resultant was washed with a washing solution five times, and 20 μL of a measurement sample or chicken serum (GIBCO, 16110) serving as a standard substance was then added thereto. The obtained mixture was reacted at room temperature for 1 hour. The resultant was washed with a washing solution five times, and 20 μL of Goat anti-chicken IgM HRP conjugated (Bethyl, A30-102P), which had been 5000 times diluted with PBS containing 1% BSA and 0.05% Tween 20, was then added thereto. The obtained mixture was reacted at room temperature for 1 hour. Thereafter, the reaction mixture was washed with a washing solution five times, 20 μL of TMB+(Dako, 5159985) was then added thereto, and the obtained mixture was subjected to a coloring reaction at room temperature for 3 minutes. Subsequently, 20 μL of 1 N sulfuric acid was added to the reaction mixture to termination the reaction. Using Infinite M1000 (TECAN), the absorbance at 450 nm was measured.

[0243] The results are shown in Table 15. It was confirmed that, as with 13-1 above, only chicken IgM was secreted from wild-type DT40, whereas human IgG₁ was secreted from the transformed cell lines #7-7, #11-3 and #11-6.

TABLE 15

| | Human IgG1 (μg/mL) | Chicken IgM (μg/mL) |
|---|---|---|
| Wild type | <0.01 | 2.33 |
| #7-7 | 0.13 | <0.01 |
| #11-3 | 0.24 | <0.01 |
| #11-6 | 0.16 | <0.01 |

### 19. Confirmation of Gene Conversion

[0244] Using the cell lines in which the expression of an antibody had been confirmed in 10 above, gene conversion was confirmed. Using, as a template, the genomic DNA extracted from the cells, which had been cultured for 42 days in the presence of TSA, by the method described in 4 above, a light chain variable region was amplified by PCR using a sense primer to which a recognition sequence had been added (CGTATCGCCTCCCTCGCGCCATCAGNNNNNNNNNNCAGGTTCCCTGGTGCAGGC) (SEQ ID NO: 46), and an antisense primer (CTATGCGCCTTGCCAGCCCGCTCAGGCTTGGTCCCTCCGCCGAA) (SEQ ID NO: 47), and a heavy chain variable region was amplified by PCR using a sense primer (CTATGCGCCTTGCCAGCCCGCTCAGTCCGTCAGCGCTCTCT) (SEQ ID NO: 56) and an antisense primer to which an identification tag had been added (CGTATCGCCTCCCTCGCGCCATCAGNNNNNNNNNNTGGGGGGGGTTCATATGAAG) (SEQ ID NO: 57). Thereafter, sequence analyses were carried out based on the method described in 4 above. The results of the sequence analysis performed on the variable regions of the light chain and heavy chain in the cell line #11-6 (the top 10) are shown in Table 16 and Table 17, respectively. A clone comprising a the additionally inserted human pseudogene-derived sequence was found in the variable regions of both of the light chain and the heavy chain, and it was demonstrated that more various sequences than in the case of L15/H15 cell line were generated as a result of gene conversion. In addition, it was also confirmed that a variety of sequences were generated as a result of gene conversion even in other cell lines.

TABLE 16

| # | % | CDR1 | CDR2 | CDR3 |
|---|---|---|---|---|
| 1 | 0.166 | VL | pVL105 | VL |
| 2 | 0.166 | pVL105 | VL | VL |
| 3 | 0.125 | pVL113 | pVL113 | pVL113 |
| 4 | 0.125 | VL | pVL109 | VL |
| 5 | 0.083 | Not matched | pVL105 | VL |
| 6 | 0.083 | VL | pVL104 | pVL104 |
| 7 | 0.083 | VL | pVL113 | VL |
| 8 | 0.083 | pVL114 | pVL114 | pVL114 |
| 9 | 0.042 | pVL109 | pVL109 | pVL109 |
| 10 | 0.042 | pVL105 | pVL115 | pVL115 |

VL: sequence inserted into variable region
pVL: sequence inserted into pseudogene region
Not matched: sequence that is not completely matched with either VL or pVL (which is probably caused by partial genetic recombination or mutation)

TABLE 17

| # | % | CDR1 | CDR2 | CR3 |
|---|---|---|---|---|
| 1 | 1.077 | pVH123 | VH | VH |
| 2 | 0.824 | VH | pVH129 | VH |
| 3 | 0.760 | pVH104 | Not matched | VH |
| 4 | 0.507 | pVH123 | Not matched | VH |
| 5 | 0.444 | pVH117 | Not matched | VH |
| 6 | 0.380 | pVH129 | pVH129 | VH |
| 7 | 0.380 | pVH126 | pVH112 | VH |
| 8 | 0.380 | VH | pVH111 | Not matched |
| 9 | 0.317 | pVH102 | VH | Not matched |
| 10 | 0.253 | pVH112 | Not matched | VH |

VH: sequence inserted into variable region
pVH: sequence inserted into pseudogene region
Not matched: sequence that is not completely matched with either VH or pVH (which is probably caused by partial genetic recombination or mutation)

Production of L30/H30 Cell Line, in which 30 Pseudogene Regions Each Consisting of Human Variable Region-Derived Sequence have been Inserted into Light Chain, and 30 Such Pseudogene Regions have been Inserted into Heavy Chain
20. Knocking-in into Chicken Antibody Light Chain (Igλ) Pseudogene and Variable Regions
(1) Human Antibody Light Chain Pseudogene Sequence (pVL30)

[0245] Based on the sequences of human immunoglobulin λ variable regions in the database, 30 CDR1, CDR2 and CDR3 sequences were selected, and the framework sequence of the human Igλ variable region cloned in 1-1 above was then combined therewith, so as to design 30 sequences, namely, pVL101 (SEQ ID NO: 74), pVL102 (SEQ ID NO: 75), pVL103 (SEQ ID NO: 76), pVL104 (SEQ ID NO: 77), pVL105 (SEQ ID NO: 78), pVL106 (SEQ ID NO: 79), pVL107 (SEQ ID NO: 80), pVL108 (SEQ ID NO: 81), pVL109 (SEQ ID NO: 82), pVL110 (SEQ ID NO: 83), pVL111 (SEQ ID NO: 84), pVL112 (SEQ ID NO: 85), pVL113 (SEQ ID NO: 86), pVL114 (SEQ ID NO: 87), pVL115 (SEQ ID NO: 88), pVL116 (SEQ ID NO: 127), pVL117 (SEQ ID NO: 128), pVL118 (SEQ ID NO: 129), pVL119 (SEQ ID NO: 130), pVL120 (SEQ ID NO: 131), pVL121 (SEQ ID NO: 132), pVL122 (SEQ ID NO: 133), pVL123 (SEQ ID NO: 134), pVL124 (SEQ ID NO: 135), pVL125 (SEQ ID NO: 136), pVL126 (SEQ ID NO: 137), pVL127 (SEQ ID NO: 138), pVL128 (SEQ ID NO: 139), pVL129 (SEQ ID NO: 140), and pVL130 (SEQ ID NO: 141). Thereafter, a human antibody light chain pseudogene sequence pVL30 (SEQ ID NO: 142) comprising these sequences was designed, and was then subjected to gene synthesis.

### (2) Construction of Targeting Vector

[0246] The human pseudogene sequence pVL30 synthesized in the above section was incorporated into the multi-cloning site of the pVL KI_pUC19_step6_BrRev in 16-2 above, so as to construct a targeting vector pVL KI_pUC19_step6_BrRev_#odd+even (SEQ ID NO: 143) as shown in FIG. 26.

### 21. Production of Cell Lines

[0247] The pVL KI_pUC19_step6_BrRev_#odd+even prepared in 20 above was introduced into the L15/H30 cell line produced in 17 above to produce cell lines.

[0248] The pVL KI_pUC19_step6_BrRev_#odd+even, which had been linearized with the restriction enzyme NotI, was introduced into the aforementioned cell line, and the obtained mixture was then cultured in a medium containing 2 mg/mL G418 and 10 μg/mL blasticidin. Thereafter, the growing cells were subjected to genotyping by PCR, so as to confirm that substitution had occurred in a gene locus of interest. Thereafter, Cre_pEGFP-C1 was introduced into the cells, and the resulting cells were then subjected to cell sorting to select GFP-positive cells. Thereafter, the selected cells were subjected to genotyping by PCR, so as to obtain cell lines #7-7-48-5, #7-7-48-7 and #7-7-48-10, from each of which the drug resistance genes had been removed.

### 22. Confirmation of Antibody Expression (Flow Cytometry and ELISA)

### 22-1. Analysis by Flow Cytometry

[0249] Based on the method described in 3 above, the expression of an antibody in the cells produced in 21 above was confirmed. The results are shown in FIG. 27. It was confirmed that only chicken IgM was expressed in wild-type DT40, whereas the expression of chicken IgM disappeared and instead, human Igγ and Igλ were expressed in the transformed cell lines #7-7-48-5, #7-7-48-7 and #7-7-48-10 (FIG. 27).

### 22-2. Analysis by ELISA

[0250] Based on the method described in 18-2 above, the antibodies secreted from the cells produced in 21 above were measured. The results are shown in Table 18. As with 13-1 above, it was confirmed that only chicken IgM was secreted from wild-type DT40, whereas human IgG₁ was secreted from the transformed cell lines #7-7-48-5, #7-7-48-7 and #7-7-48-10.

TABLE 18

| | Human IgG1 (μg/mL) | Chicken IgM (μg/mL) |
|---|---|---|
| Wild type | <0.01 | 2.33 |
| #7-7-48-5 | 0.26 | <0.01 |
| #7-7-48-7 | 0.16 | <0.01 |
| #7-7-48-10 | 0.13 | <0.01 |

### 23. Confirmation of Gene Conversion

[0251] Using the cell lines in which the expression of an antibody had been confirmed in 22 above, gene conversion was confirmed. Using, as a template, the genomic DNA extracted from the cells, which had been cultured for 42 days in the presence of TSA, by the method described in 4 above, a light chain variable region was amplified by PCR using a sense primer to which a recognition sequence had been added (CGTATCGCCTCCCTCGCGCCATCAGNNNNNNNNNNCAGGTTCCCTGGTGCAGGC) (SEQ ID NO: 46), and an antisense primer (CTATGCGCCTTGCCAGCCCGCTCAGGCTTGGTCCCTCCGCCGAA) (SEQ ID NO: 47), and a heavy chain variable region was amplified by PCR using a sense primer (CTATGCGCCTTGCCAGCCCGCTCAGTCCGTCAGCGCTCTCT) (SEQ ID NO: 56), and an antisense primer to which an identification tag had been added (CGTATCGCCTCCCTCGCGCCATCAGNNNNNNNNNNTGGGGGGGGTTCATATGAAG) (SEQ ID NO: 57). Thereafter, sequence analyses were carried out based on the method described in 4 above. The results of the sequence analysis performed on the variable regions of the light chain and heavy chain in the cell line #7-7-48-10 (the top 10) are shown in Table 19 and Table 20, respectively. A clone comprising the additionally inserted human pseudogene-derived sequence was found in the variable regions of both of the light chain and the heavy chain, and it was demonstrated that more various sequences were generated by increasing the number of pseudogenes. In addition, it was also confirmed that a variety of sequences were generated as a result of gene conversion even in other cell lines.

TABLE 19

| # | % | CDR1 | CDR2 | CDR3 |
|---|---|---|---|---|
| 1 | 0.347* | VL | pVL118 | VL |
| 2 | 0.270 | pVL119 | VL | VL |
| 3 | 0.154 | VL | pVL123 | pVL118 |
| 4 | 0.116 | pVL130 | pVL130 | pVL130 |
| 5 | 0.116 | VL | VL | pVL127 |
| 6 | 0.077 | pVL116 | pVL116 | pVL116 |
| 7 | 0.077 | pVL119 | pVL119 | VL |
| 8 | 0.077 | VL | pVL129 | pVL129 |
| 9 | 0.077 | VL | pVL105 | VL |
| 10 | 0.077* | VL | pVL118 | VL |

VL: sequence inserted into variable region
pVL: sequence inserted into pseudogene region
Not matched: sequence that is not completely matched with either VL or pVL (which is probably caused by partial genetic recombination or mutation)
*Sequences of portions other than CDRs are different, respectively.

TABLE 20

| # | % | CDR1 | CDR2 | CDR3 |
|---|---|---|---|---|
| 1 | 33.191* | pVH104 | Not matched | VH |
| 2 | 8.085 | pVH129 | Not matched | VH |
| 3 | 6.241 | pVH108 | Not matched | VH |
| 4 | 5.106 | pVH111 | Not matched | VH |
| 5 | 3.688** | pVH126 | Not matched | VH |
| 6 | 1.418 | pVH126 | pVH126 | VH |
| 7 | 1.418 | pVH101 | Not matched | VH |
| 8 | 1.277* | pVH104 | Not matched | VH |
| 9 | 1.277** | pVH126 | Not matched | VH |
| 10 | 0.993* | pVH104 | Not matched | VH |

VH: sequence inserted into variable region
pVH: sequence inserted into pseudogene region
Not matched: sequence that is not completely matched with either VH or pVH (which is probably caused by partial genetic recombination or mutation)
*Sequences of CDR2 are different, respectively.
**Sequences of CDR2 are different, respectively.

Production of L30/H15 Cell Line, in which 30 Pseudogene Regions Each Consisting of Human Variable Region-Derived Sequence have been Inserted into Light Chain, and 15 Such Pseudogene Regions have been Inserted into Heavy Chain

### 24. Production of Cell Lines

[0252] The pVL KI_pUC19_step6_BrRev_#odd+even prepared in 20 above was introduced into the L15/H15 cell line A12-4 produced in 17 above to produce cell lines.

[0253] The pVL KI_pUC19_step6_BrRev_pVL#odd+even, which had been linearized with the restriction enzyme NotI, was introduced into the aforementioned cell line, and the obtained mixture was then cultured in a medium containing 2 mg/mL G418 and 10 μg/mL blasticidin. Thereafter, the growing cells were subjected to genotyping by PCR, so as to confirm that substitution had occurred in a gene locus of interest. Thereafter, Cre_pEGFP-C1 was introduced into the cells, and the resulting cells were then subjected to cell sorting to select GFP-positive cells. Thereafter, the selected cells were subjected to genotyping by PCR, so as to obtain cell lines A77-3 and A77-2, from each of which the drug resistance genes had been removed.

### 25. Confirmation of Antibody Expression (Flow Cytometry and ELISA)

### 25-1. Analysis by Flow Cytometry

[0254] Based on the method described in 3 above, the expression of an antibody in the cells produced in 24 above was confirmed. The results are shown in FIG. 28. It was confirmed that only chicken IgM was expressed in wild-type DT40, whereas the expression of chicken IgM disappeared and instead, human Igγ and Igλ were expressed in the transformed cell lines A77-3 and A77-2 (FIG. 28).

### 25-2. Analysis by ELISA

[0255] Based on the method described in 3-2 above, the antibodies secreted from the cells produced in 24 above were measured. The results are shown in Table 21. As with 13-1 above, it was confirmed that only chicken IgM was secreted from wild-type DT40, whereas human IgG₁ was secreted from the transformed cell lines A77-3 and A77-2.

TABLE 21

| | Human IgG1 (μg/mL) | Chicken IgM (μg/mL) |
|---|---|---|
| Wild type | <0.01 | 2.33 |
| A77-3 | 0.48 | <0.01 |
| A77-2 | 0.48 | <0.01 |

Production of L30/H15f15f and L30/H15r15f Cell Lines, in which 30 Pseudogene Regions Each Consisting of Human Variable Region-Derived Sequence have been Inserted into Light Chain and 30 Such Pseudogene Regions have been Inserted into Heavy Chain According to RMCE Method

### 26. Production of Vectors

[0256] 26-1. Further Insertion of 15 Pseudogenes Constructed in Forward Direction into Chicken Antibody Heavy Chain (IgM) Pseudogene Region
(1) Human Antibody Heavy Chain Pseudogene Sequence (pVH15a)

[0257] The pVH116, pVH117, pVH118, pVH119, pVH120, pVH121, pVH122, pVH123, pVH124, pVH125, pVH126, pVH127, pVH128, pVH129 and pVH130, which had been designed in 16 above, were ligated to one another in the forward direction, so as to produce pVH15a (SEQ ID NO: 144).

### (2) Construction of Vector

[0258] Loxm3 rev sequence, Neomycin resistance gene, SV40 early poly A terminator, SV40 polyadenylation region, loxP for RE sequence, pVH15a (forward direction), and loxm7 rev LE sequence were inserted into a pUC57-Amp vector, so as to produce a vector RMCE_pVH1stKI_pVH15evenFor (SEQ ID NO: 145) as shown in FIG. 29.

26-2. Further Insertion of 15 Pseudogenes Constructed in Reverse Direction into Chicken Antibody Heavy Chain (IgM) Pseudogene Region

[0259] Loxm3 rev sequence, Neomycin resistance gene, SV40 early poly A terminator, SV40 polyadenylation region, loxP for RE sequence, pVH15a (reverse direction), and loxm7 rev LE sequence were inserted into a pUC57-Amp vector, so as to produce a vector RMCE_pVH1stKI_pVH15evenRev (SEQ ID NO: 146) as shown in FIG. 29.

### 27. Production of Cell Lines

[0260] An L30/H15f15f cell line was produced by introducing the RMCE_pVH1stKI_pVH15evenFor produced in 26-1 above into the L30/H15 cell line produced in 24 above.

[0261] The RMCE_pVH1stKI_pVH15evenFor, together with Cre_pEGFP-C1, was introduced into the aforementioned cell line to induce site-specific recombination, and the obtained mixture was then cultured in a medium containing 2 mg/mL G418. Thereafter, the growing cells were subjected to genotyping by PCR, and cell lines 1-6-1 and 1-7-3 were obtained, in which substitution was confirmed to have occurred in a gene locus of interest.

[0262] An L30/H15r15f cell line was produced by introducing the RMCE_pVH1stKI_pVH15evenRev produced in 26-2 into the L30/H15 cell line produced in 24 above.

[0263] The RMCE_pVH1stKI_pVH15evenRev, together with Cre_pEGFP-C1, was introduced into the aforementioned cell line to induce site-specific recombination, and the obtained mixture was then cultured in a medium containing 2 mg/mL G418. Thereafter, the growing cells were subjected to genotyping by PCR, and cell lines 2-1-1 and 7-3-2 were obtained, in which substitution was confirmed to have occurred in a gene locus of interest.

### 28. Confirmation of Antibody Expression (Flow Cytometry and ELISA)

### 28-1. Analysis by Flow Cytometry

[0264] Based on the method described in 3 above, the expression of an antibody in the cells produced in 27 above was confirmed. The results are shown in FIG. 30. It was confirmed that only chicken IgM was expressed in wild-type DT40, whereas the expression of chicken IgM disappeared and instead, human Igγ and Igλ were expressed in the transformed cell lines 1-6-1, 1-7-3, 2-1-1 and 7-3-2 (FIG. 30).

### 28-2. Analysis by ELISA

[0265] Based on the method described in 3-2 above, the antibodies secreted from the cells produced in 27 above were measured. The results are shown in Table 22. As with 13-1 above, it was confirmed that only chicken IgM was secreted from wild-type DT40, whereas human IgG₁ was secreted from the transformed cell lines 1-6-1, 1-7-3, 2-1-1 and 7-3-2.

TABLE 22

| | Human IgG1 (μg/mL) | Chicken IgM (μg/mL) |
|---|---|---|
| Wild type | <0.01 | 2.33 |
| 1-6-1 | 0.18 | <0.01 |
| 1-7-3 | 0.07 | <0.01 |
| 2-1-1 | 0.12 | <0.01 |
| 7-3-2 | 0.18 | <0.01 |

### 29. Confirmation of Gene Conversion

[0266] Using the cell lines in which the expression of an antibody had been confirmed in 10 above, gene conversion was confirmed. Using, as a template, the genomic DNA extracted from the cells, which had been cultured for 42 days in the presence of TSA, by the method described in 4 above, a light chain variable region was amplified by PCR using a sense primer to which a recognition sequence had been added (CGTATCGCCTCCCTCGCGCCATCAGNNNNNNNNNNCAGGTTCCCTGGTGCAGGC) (SEQ ID NO: 46), and an antisense primer (CTATGCGCCTTGCCAGCCCGCTCAGGCTTGGTCCCTCCGCCGAA) (SEQ ID NO: 47), and a heavy chain variable region was amplified by PCR using a sense primer (CTATGCGCCTTGCCAGCCCGCTCAGTCCGTCAGCGCTCTCT) (SEQ ID NO: 56), and an antisense primer to which an identification tag had been added (CGTATCGCCTCCCTCGCGCCATCAGNNNNNNNNNNTGGGGGGGGTTCATATGAAG) (SEQ ID NO: 57). Thereafter, sequence analyses were carried out based on the method described in 4 above. The results of the sequence analysis performed on the variable regions of the light chain and heavy chain in the cell line 1-6-1 (the top 10) are shown in Table 23 and Table 24, respectively, and the results of the sequence analysis performed on the variable regions of the light chain and heavy chain in the cell line 7-3-2 (the top 10) are shown in Table 25 and Table 26, respectively. A clone comprising the additionally inserted human pseudogene-derived sequence was found in the variable regions of both of the light chain and the heavy chain, and it was demonstrated that a variety of sequences were generated as in the case of the L30/H30 cell line. In addition, it was also confirmed that a variety of sequences were generated as a result of gene conversion even in other cell lines.

TABLE 23

| # | % | CDR1 | CDR2 | CDR3 |
|---|---|---|---|---|
| 1 | 0.935 | VL | pVL102 | VL |
| 2 | 0.468 | VL | pVL118 | VL |
| 3 | 0.271 | Not matched | pVL102 | VL |
| 4 | 0.271* | pVL119 | VL | VL |
| 5 | 0.222 | VL | VL | pVL129 |
| 6 | 0.172* | pVL119 | VL | VL |
| 7 | 0.172 | VL | pVL105 | VL |
| 8 | 0.123 | VL | pVL130 | VL |
| 9 | 0.098 | Not matched | pVL122 | VL |
| 10 | 0.098 | VL | pVL109 | VL |

VL: sequence inserted into variable region
pVL: sequence inserted into pseudogene region
Not matched: sequence that is not completely matched with either VL or pVL (which is probably caused by partial genetic recombination or mutation)
*Sequences of portions other than CDRs are different, respectively.

TABLE 24

| # | % | CDR1 | CDR2 | CDR3 |
|---|---|---|---|---|
| 1 | 6.393* | pVH112 | Not matched | VH |
| 2 | 0.586 | pVH109 | Not matched | VH |
| 3 | 0.479 | pVH108 | Not matched | VH |
| 4 | 0.479 | pVH117 | Not matched | VH |
| 5 | 0.426 | pVH107 | Not matched | VH |
| 6 | 0.320 | pVH124 | Not matched | VH |
| 7 | 0.266* | pVH112 | Not matched | VH |
| 8 | 0.266 | VH | Not matched | pVH109 |
| 9 | 0.160 | Not matched | pVH125 | VH |
| 10 | 0.160* | pVH112 | Not matched | VH |

VH: sequence inserted into variable region
pVH: sequence inserted into pseudogene region
Not matched: sequence that is not completely matched with either VH or pVH (which is probably caused by partial genetic recombination or mutation)
*Sequences of CDR2 are different, respectively.

TABLE 25

| # | % | CDR1 | CDR2 | CDR3 |
|---|---|---|---|---|
| 1 | 0.293 | VL | pVL109 | VL |
| 2 | 0.267 | pVL119 | VL | VL |
| 3 | 0.187* | pVL105 | VL | VL |
| 4 | 0.160 | VL | VL | pVL129 |
| 5 | 0.133 | VL | pVL101 | VL |
| 6 | 0.133 | VL | pVL118 | VL |
| 7 | 0.133 | VL | VL | pVL127 |
| 8 | 0.107 | pVL119 | pVL119 | VL |
| 9 | 0.080 | VL | VL | pVL123 |
| 10 | 0.080* | pVL105 | VL | VL |

VL: sequence inserted into variable region
pVL: sequence inserted into pseudogene region
Not matched: sequence that is not completely matched with either VL or pVL (which is probably caused by partial genetic recombination or mutation)
*Sequences of portions other than CDRs are different, respectively.

TABLE 26

| # | % | CDR1 | CDR2 | CDR3 |
|---|---|---|---|---|
| 1 | 0.867* | VH | Not matched | pVH109 |
| 2 | 0.819* | VH | Not matched | pVH109 |
| 3 | 0.819 | VH | Not matched | pVH116 |
| 4 | 0.337 | pVH109 | Not matched | VH |
| 5 | 0.241* | VH | Not matched | pVH109 |
| 6 | 0.193 | pVH105 | Not matched | VH |
| 7 | 0.193 | pVH117 | Not matched | VH |
| 8 | 0.145 | pVH112 | Not matched | VH |
| 9 | 0.145 | pVH126 | Not matched | pVH116 |
| 10 | 0.096 | pVH107 | Not matched | pVH109 |

VH: sequence inserted into variable region
pVH: sequence inserted into pseudogene region
Not matched: sequence that is not completely matched with either VH or pVH (which is probably caused by partial genetic recombination or mutation)
*Sequences of CDR2 are different, respectively.

Production of L30/H15f15f15f and L30/H15r15r15f Cell Lines in which 30 Pseudogene Regions Each Consisting of Human Variable Region-Derived Sequence have been Inserted into Light Chain and 45 Such Pseudogene Regions have been Inserted into Heavy Chain According to RMCE Method

### 30. Production of Vector

[0267] 30-1. Further Insertion of 15 Pseudogenes Constructed in Forward Direction into Chicken Antibody Heavy Chain (IgM) Pseudogene Region
(1) Human Antibody Heavy Chain Pseudogene Sequence (pVH15b)

[0268] Based on the sequences of a human immunoglobulin heavy chain variable regions in the database, novel 15 CDR1, CDR2 and CDR 3 sequences were selected, and pVH131 (SEQ ID NO: 147), pVH132 (SEQ ID NO: 148), pVH133 (SEQ ID NO: 149), pVH134 (SEQ ID NO: 150), pVH135 (SEQ ID NO: 151), pVH136 (SEQ ID NO: 152), pVH137 (SEQ ID NO: 153), pVH138 (SEQ ID NO: 154), pVH139 (SEQ ID NO: 155), pVH140 (SEQ ID NO: 156), pVH141 (SEQ ID NO: 157), pVH142 (SEQ ID NO: 158), pVH143 (SEQ ID NO: 159), pVH144 (SEQ ID NO: 160), and pVH145 (SEQ ID NO: 161) were ligated to one another in the forward direction to produce pVH15b (SEQ ID NO: 162).

### (2) Construction of Vector

[0269] Loxm3 rev sequence, blasticidin resistance gene, SV40 early poly A terminator, SV40 polyadenylation region, loxm7 rev RE sequence, pVH15b (forward direction), and loxP for LE sequence were inserted into a pUC57-Amp vector, so as to produce a vector pVH15B-ver3_RMCE2nd_For (SEQ ID NO: 163) as shown in FIG. 31.

30-2. Further Insertion of 15 Pseudogenes Constructed in Reverse Direction into Chicken Antibody Heavy Chain (IgM) Pseudogene Region

[0270] Loxm3 rev sequence, blasticidin resistance gene, SV40 early poly A terminator, SV40 polyadenylation region, loxm7 rev RE sequence, pVH15b (reverse direction), and loxP for LE sequence were inserted into a pUC57-Amp vector, so as to produce a vector pVH15B-ver3_RMCE2nd_Rev (SEQ ID NO: 164) as shown in FIG. 31.

### 31. Production of Cell Lines

[0271] An L30/H15f15f15f cell line was produced by introducing the pVH15B-ver3_RMCE2nd_For produced in 30-1 above into the L30/H15f15f cell line produced in 2 above.

[0272] The pVH15B-ver3_RMCE2nd_For, together with Cre_pEGFP-C1, was introduced into the aforementioned cell line to induce site-specific recombination, and the obtained mixture was then cultured in a medium containing 10 μg/mL blasticidin. Thereafter, the growing cells were subjected to genotyping by PCR, and cell lines 2-1-3, 2-1-11, 1-n-1 and 2-n-3 were obtained, in which substitution was confirmed to have occurred in a gene locus of interest.

[0273] An L30/H15r15r15f cell line was produced by introducing the pVH15B-ver3_RMCE2nd_Rev produced in 27-2 above into the L30/H15r15f cell line produced in 27 above.

[0274] The pVH15B-ver3_RMCE2nd_Rev, together with Cre_pEGFP-C1, was introduced into the aforementioned cell line to induce site-specific recombination, and the obtained mixture was then cultured in a medium containing 10 μg/mL blasticidin. Thereafter, the growing cells were subjected to genotyping by PCR, and cell lines 4-1-5, 4-1-7 and 3-1-11 were obtained, in which substitution was confirmed to have occurred in a gene locus of interest.

### 32. Confirmation of Antibody Expression (Flow Cytometry and ELISA)

### 32-1. Analysis by Flow Cytometry

[0275] Based on the method described in 3 above, the expression of an antibody in the cells produced in 31 above was confirmed. The results are shown in FIG. 32 and FIG. 33. It was confirmed that only chicken IgM was expressed in wild-type DT40, whereas the expression of chicken IgM disappeared and instead, human Igγ and Igλ were expressed in the transformed cell lines 2-1-3, 2-1-11, 1-n-1 and 2-n-3 (which are shown in FIG. 32), and in the transformed cell lines 4-1-5, 4-1-7 and 3-1-11 (which are shown in FIG. 33).

### 32-2. Analysis by ELISA

[0276] Based on the method described in 3-2 above, the antibodies secreted from the cells produced in 31 above were measured. The results are shown in Table 27. As with 13-1 above, it was confirmed that only chicken IgM was secreted from wild-type DT40, whereas human IgG₁ was secreted from the transformed cell lines 2-1-3, 2-1-11, 1-n-1, 2-n-3, 4-1-5, 4-1-7 and 3-1-11.

TABLE 27

| | Human IgG1 (μg/mL) | Chicken IgM (μg/mL) |
|---|---|---|
| Wild type | <0.01 | 2.33 |
| 2-1-3 | 0.36 | <0.01 |
| 2-1-11 | 0.16 | <0.01 |
| 1-n-1 | 0.18 | <0.01 |
| 2-n-3 | 0.16 | <0.01 |
| 4-1-5 | 0.37 | <0.01 |
| 4-1-7 | 0.94 | <0.01 |
| 3-1-11 | 1.31 | <0.01 |

### 33. Confirmation of Gene Conversion

[0277] Using the cell lines in which the expression of an antibody had been confirmed in 10 above, gene conversion was confirmed. Using, as a template, the genomic DNA extracted from the cells, which had been cultured for 42 days in the presence of TSA, by the method described in 4 above, a light chain variable region was amplified by PCR using a sense primer to which a recognition sequence had been added (CGTATCGCCTCCCTCGCGCCATCAGNNNNNNNNNNCAGGTTCCCTGGTGCAGGC) (SEQ ID NO: 46), d, and an antisense primer (CTATGCGCCTTGCCAGCCCGCTCAGGCTTGGTCCCTCCGCCGAA) (SEQ ID NO: 47), and a heavy chain variable region was amplified by PCR using a sense primer (CTATGCGCCTTGCCAGCCCGCTCAGTCCGTCAGCGCTCTCT) (SEQ ID NO: 56), and an antisense primer to which an identification tag had been added (CGTATCGCCTCCCTCGCGCCATCAGNNNNNNNNNNTGGGGGGGGTTCATATGAAG) (SEQ ID NO: 57). Thereafter, sequence analyses were carried out based on the method described in 4 above. The results of the sequence analysis performed on the variable regions of the light chain and heavy chain in the cell line 2-1-3 (the top 10) are shown in Table 28 and Table 29, and the results of the sequence analysis performed on the variable regions of the light chain and heavy chain in the cell line 3-1-11 (the top 10) are shown in Table 30 and Table 31, respectively. A clone comprising the additionally inserted human pseudogene-derived sequence was found in the variable regions of both of the light chain and the heavy chain, and it was demonstrated that a variety of sequences were generated as a result of gene conversion. In addition, it was also confirmed that a variety of sequences were generated as a result of gene conversion even in other cell lines.

TABLE 28

| # | % | CDR1 | CDR2 | CDR3 |
|---|---|---|---|---|
| 1 | 0.882* | pVL119 | VL | VL |
| 2 | 0.428** | VL | pVL118 | VL |
| 3 | 0.241 | pVL119 | pVL119 | VL |
| 4 | 0.187** | VL | pVL118 | VL |
| 5 | 0.187** | VL | pVL118 | VL |
| 6 | 0.134 | VL | pVL119 | VL |
| 7 | 0.134 | VL | pVL109 | VL |
| 8 | 0.134 | pVL105 | VL | VL |
| 9 | 0.107* | pVL119 | VL | VL |
| 10 | 0.080 | VL | pVL105 | VL |

VL: sequence inserted into variable region
pVL: sequence inserted into pseudogene region
Not matched: sequence that is not completely matched with either VL or pVL (which is probably caused by partial genetic recombination or mutation)
*, **Sequences of portions other than CDRs are different, respectively.

TABLE 29

| # | % | CDR1 | CDR2 | CDR3 |
|---|---|---|---|---|
| 1 | 2.226 | pVH112 | Not matched | VH |
| 2 | 1.272 | pVH109 | Not matched | VH |
| 3 | 0.636 | VH | pVH112 | VH |
| 4 | 0.477 | pVH144 | Not matched | VH |
| 5 | 0.477 | pVH105 | Not matched | VH |
| 6 | 0.318 | pVH145 | Not matched | VH |
| 7 | 0.318 | pVH137 | Not matched | VH |
| 8 | 0.318* | pVH108 | Not matched | VH |
| 9 | 0.318* | pVH108 | Not matched | VH |
| 10 | 0.318 | VH | Not matched | pVH116 |

VH: sequence inserted into variable region
pVH: sequence inserted into pseudogene region
Not matched: sequence that is not completely matched with etiher VH or pVH (which is probably caused by partial genetic recombination or mutation)
*Sequences of CDR2 are different, respectively.

TABLE 30

| # | % | CDR1 | CDR2 | CDR3 |
|---|---|---|---|---|
| 1 | 1.000 | pVL105 | VL | VL |
| 2 | 0.788 | pVL119 | VL | VL |
| 3 | 0.515* | VL | pVL118 | VL |
| 4 | 0.455* | VL | pVL118 | VL |
| 5 | 0.182 | VL | pVL105 | VL |
| 6 | 0.152** | pVL119 | pVL119 | VL |
| 7 | 0.152 | VL | pVL109 | VL |
| 8 | 0.121 | VL | pVL104 | VL |
| 9 | 0.091** | pVL119 | pVL119 | VL |
| 10 | 0.091 | VL | pVL107 | VL |

VL: sequence inserted into variable region
pVL: sequence inserted into pseudogene region
Not matched: sequence that is not completely matched with either VL or pVL (which is probably caused by partial genetic recombination or mutation)
*, **Sequences of portions other than CDRs are different, respectively.

TABLE 31

| # | % | CDR1 | CDR2 | CDR3 |
|---|---|---|---|---|
| 1 | 1.524 | pVH109 | Not matched | VH |
| 2 | 1.220 | pVH112 | Not matched | VH |
| 3 | 0.915 | pVH117 | Not matched | VH |
| 4 | 0.915 | pVH142 | Not matched | VH |
| 5 | 0.610 | pVH108 | Not matched | VH |
| 6 | 0.610 | pVH138 | Not matched | VH |
| 7 | 0.610 | pVH107 | Not matched | VH |
| 8 | 0.457 | pVH139 | Not matched | VH |
| 9 | 0.457 | pVH102 | Not matched | VH |
| 10 | 0.457 | pVH142 | Not matched | Not matched |

VH: sequence inserted into variable region
pVH: sequence inserted into pseudogene region
Not matched: sequence that is not completely matched with either VH or pVH (which is probably caused by partial genetic recombination or mutation)

Production of L30/H15f15f15f15f and L30/H15r15r15r15f Cell Lines, in which 30 Pseudogene Regions Each Consisting of Human Variable Region-Derived Sequence have been Inserted into Light Chain and 60 Such Pseudogene Regions have been Inserted into Heavy Chain According to RMCE Method

### 34. Production of Vector

[0278] 34-1. Further Insertion of 15 Pseudogenes Constructed in Forward Direction into Chicken Antibody Heavy Chain (IgM) Pseudogene Region
(1) Human Antibody Heavy Chain Pseudogene Sequence (pVH15c)

[0279] Based on the sequences of human immunoglobulin heavy chain variable regions in the database, novel 15 CDR1, CDR2 and CDR 3 sequences were selected, and pVH146 (SEQ ID NO: 165), pVH147 (SEQ ID NO: 166), pVH148 (SEQ ID NO: 167), pVH149 (SEQ ID NO: 168), pVH150 (SEQ ID NO: 169), pVH151 (SEQ ID NO: 170), pVH152 (SEQ ID NO: 171), pVH153 (SEQ ID NO: 172), pVH154 (SEQ ID NO: 173), pVH155 (SEQ ID NO: 174), pVH156 (SEQ ID NO: 175), pVH157 (SEQ ID NO: 176), pVH158 (SEQ ID NO: 177), pVH159 (SEQ ID NO: 178), and pVH160 (SEQ ID NO: 179) were ligated to one another in the forward direction to produce pVH15c (SEQ ID NO: 180).

### (2) Construction of Vector

[0280] Loxm3 rev sequence, neomycin resistance gene, SV40 early poly A terminator, SV40 polyadenylation region, loxP for RE sequence, pVH15c (forward direction), and loxm7 rev LE sequence were inserted into a pUC57-Amp vector, so as to produce a vector pVH15A_RMCE1st_Fw (SEQ ID NO: 181) as shown in FIG. 34.

34-2. Further Insertion of 15 Pseudogenes Constructed in Reverse Direction into Chicken Antibody Heavy Chain (IgM) Pseudogene Region

[0281] Loxm3 rev sequence, neomycin resistance gene, SV40 early poly A terminator, SV40 polyadenylation region, loxP for RE sequence, pVH15c (reverse direction), and loxm7 rev LE sequence were inserted into a pUC57-Amp vector, so as to produce a vector pVH15A_RMCE1st_Rv (SEQ ID NO: 182) as shown in FIG. 34.

### 35. Production of Cell Lines

[0282] An L30/H15f15f15f15f cell line was produced by introducing the pVH15A_RMCE1st_Fw produced in 34-1 above into the L30/H15f15f15f cell line produced in 31 above.

[0283] The pVH15A_RMCE1st_Fw, together with Cre_pEGFP-C1, was introduced into the aforementioned cell line to induce site-specific recombination, and the obtained mixture was then cultured in a medium containing 2 mg/mL G418. Thereafter, the growing cells were subjected to genotyping by PCR, and cell lines 1n1-3, 1n1-4, and 1n1-5 were obtained, in which substitution was confirmed to have occurred in a gene locus of interest.

[0284] An L30/H15r15r15r15f cell line was produced by introducing the pVH15A_RMCE1st_Rv produced in 34-2 above into the L30/H15r15r15f cell line produced in 31 above.

[0285] The pVH15A_RMCE1st_Rv, together with Cre_pEGFP-C1, was introduced into the aforementioned cell line to induce site-specific recombination, and the obtained mixture was then cultured in a medium containing 2 mg/mL G418. Thereafter, the growing cells were subjected to genotyping by PCR, and a cell line 3111-1 was obtained, in which substitution was confirmed to have occurred in a gene locus of interest.

### 36. Confirmation of Antibody Expression (Flow Cytometry and ELISA)

### 36-1. Analysis by Flow Cytometry

[0286] Based on the method described in 3 above, the expression of an antibody in the cells produced in 35 above was confirmed. The results are shown in FIG. 35. It was confirmed that only chicken IgM was expressed in wild-type DT40, whereas the expression of chicken IgM disappeared and instead, human Igγ and Igλ were expressed in the transformed cell lines 1n1-3, 1n1-4, 1n1-5 and 3111-1 (FIG. 35).

### 36-2. Analysis by ELISA

[0287] Based on the method described in 3-2 above, the antibodies secreted from the cells produced in 35 above were measured. The results are shown in Table 32. As with 13-1 above, it was confirmed that only chicken IgM was secreted from wild-type DT40, whereas human IgG₁ was secreted from the transformed cell lines 1n1-3, 1n1-4, 1n1-5 and 3111-1.

TABLE 32

| | Human IgG1 (μg/mL) | Chicken IgM (μg/mL) |
|---|---|---|
| Wild type | <0.01 | 2.33 |
| 1n1-3 | 0.32 | <0.01 |
| 1n1-4 | 0.34 | <0.01 |
| 1n1-5 | 0.22 | <0.01 |
| 3111-1 | 0.49 | <0.01 |

### 37. Confirmation of Gene Conversion

[0288] Using the cell lines in which the expression of an antibody had been confirmed in 10 above, gene conversion was confirmed. Using, as a template, the genomic DNA extracted from the cells, which had been cultured for 42 days in the presence of TSA, by the method described in 4 above, a light chain variable region was amplified by PCR using a sense primer to which a recognition sequence had been added (GTATCGCCTCCCTCGCGCCATCAGNNNNNNNNNNCAGGTTCCCTGGTGCAGGC) (SEQ ID NO: 46), and an antisense primer (CTATGCGCCTTGCCAGCCCGCTCAGGCTTGGTCCCTCCGCCGAA) (SEQ ID NO: 47), and a heavy chain variable region was amplified by PCR using a sense primer (CTATGCGCCTTGCCAGCCCGCTCAGTCCGTCAGCGCTCTCT) (SEQ ID NO: 56), and an antisense primer to which an identification tag had been added (CGTATCGCCTCCCTCGCGCCATCAGNNNNNNNNNNTGGGGGGGGTTCATATGAAG) (SEQ ID NO: 57). Thereafter, sequence analyses were carried out based on the method described in 4 above. The results of the sequence analysis performed on the variable regions of the light chain and heavy chain in the cell line 1n1-3 (the top 10) are shown in Table 33 and Table 34, and the results of the sequence analysis performed on the variable regions of the light chain and heavy chain in the cell line 3111-1 (the top 10) are shown in Table 35 and Table 36, respectively. A clone comprising the additionally inserted human pseudogene-derived sequence was found in the variable regions of both of the light chain and the heavy chain, and it was demonstrated that more various sequences were generated as a result of gene conversion. In addition, it was also confirmed that a variety of sequences were generated as a result of gene conversion even in other cell lines.

TABLE 33

| # | % | CDR1 | CDR2 | CDR3 |
|---|---|---|---|---|
| 1 | 1.217 | Not matched | pVL105 | VL |
| 2 | 0.466* | Not matched | pVL118 | VL |
| 3 | 0.304 | pVL119 | VL | VL |
| 4 | 0.223** | pVL119 | pVL119 | VL |
| 5 | 0.223* | Not matched | pVL118 | VL |
| 6 | 0.162 | Not matched | pVL109 | VL |
| 7 | 0.162 | pVL105 | VL | VL |
| 8 | 0.142 | Not matched | pVL119 | VL |
| 9 | 0.081 | Not matched | VL | pVL129 |
| 10 | 0.061** | pVL119 | pVL119 | VL |

VL: sequence inserted into variable region
pVL: sequence inserted into pseudogene region
Not matched: sequence that is not completely matched with either VL or pVL (which is probably caused by partial genetic recombination or mutation)
*Sequences of CDR2 are different, respectively
**Sequences of portions other than CDRs are different, respectively.

TABLE 34

| # | % | CDR1 | CDR2 | CDR3 |
|---|---|---|---|---|
| 1 | 63.115* | pVH105 | Not matched | VH |
| 2 | 2.186 | pVH138 | pVH138 | VH |
| 3 | 0.929 | pVH124 | Not matched | VH |
| 4 | 0.820 | pVH112 | Not matched | VH |
| 5 | 0.765* | pVH105 | Not matched | VH |
| 6 | 0.656* | pVH105 | Not matched | VH |
| 7 | 0.601 | pVH155 | Not matched | VH |
| 8 | 0.601* | pVH105 | Not matched | VH |
| 9 | 0.546* | pVH105 | Not matched | VH |
| 10 | 0.492 | pVH156 | Not matched | VH |

VH: sequence inserted into variable region
pVH: sequence inserted into pseudogene region
Not matched: sequence that is not completely matched with either VH or pVH (which is probably caused by partial genetic recombination or mutation)
*Sequences of CDR2 are different, respectively.

TABLE 35

| # | % | CDR1 | CDR2 | CDR3 |
|---|---|---|---|---|
| 1 | 0.142 | VL | VL | pVL129 |
| 2 | 0.094 | VL | VL | pVL128 |
| 3 | 0.071* | pVL119 | VL | VL |
| 4 | 0.047* | pVL119 | VL | VL |
| 5 | 0.024 | Not matched | pVL107 | pVL107 |
| 6 | 0.024 | pVL108 | pVL123 | pVL123 |
| 7 | 0.024 | pVL108 | pVL108 | pVL123 |
| 8 | 0.024* | pVL119 | VL | VL |
| 9 | 0.024 | VL | VL | pVL125 |
| 10 | 0.024 | VL | VL | pVL130 |

VL: sequence inserted into variable region
pVL: sequence inserted into pseudogene region
Not matched: sequence that is not completely matched with either VL or pVL (which is probably caused by partial genetic recombination or mutation)
*Sequences of portions other than CDRs are different, respectively.

TABLE 36

| # | % | CDR1 | CDR2 | CDR3 |
|---|---|---|---|---|
| 1 | 51.762* | pVH126 | Not matched | VH |
| 2 | 23.429 | pVH108 | Not matched | VH |
| 3 | 1.053 | pVH129 | Not matched | VH |
| 4 | 0.545* | pVH126 | Not matched | VH |
| 5 | 0.436* | pVH126 | Not matched | VH |
| 6 | 0.291 | pVH104 | Not matched | VH |
| 7 | 0.291* | pVH126 | Not matched | VH |
| 8 | 0.291** | pVH126 | Not matched | Not matched |
| 9 | 0.254** | pVH126 | Not matched | Not matched |
| 10 | 0.254* | pVH126 | Not matched | VH |

VH: sequence inserted into variable region
pVH: sequence inserted into pseudogene region
Not matched: sequence that is not completely matched with either VH or pVH (which is probably caused by partial genetic recombination or mutation)
*Sequences of CDR2 are different, respectively.
*Sequences of CDR2 and CDR3 are different, respectively.

### Antibody Selection 1

### 38. Preparation of Antigen

[0289] Plexin A4 was selected as an antigen protein. Plexin A4 is a molecule belonging to Plexin A type, and has been known as a factor for controlling axon extension in the sensory nerve or the sympathetic nerve.

[0290] As an antigen, Plexin A4, in which FLAG tags were added to the C-termini of a Sema domain and a PSI (Plexin-Semaphorin-Integrin) domain, was used (the amino acid sequence is shown in SEQ ID NO: 68). Based on Accession No. NM_020911 and Accession No. EAW83796, the nucleotide sequence shown in SEQ ID NO: 67 was synthesized, and it was then inserted into an expression vector in which the EBNA-1 gene and Hygromycin resistance gene of pCEP4 (Life Technologies, V044-50) had been deleted, thereby constructing a Plexin A4 expression vector.

[0291] The obtained Plexin A4 expression vector was introduced into Free Style 293 F cells (Life Technologies, R790-07), using PEI (polyethylenimine), so that it was allowed to express therein. At that time, an expression vector comprising an EBNA-1 gene was also introduced into the cells, separately. The expression was carried out at 3 L-scale, and the culture was carried out for 7 days.

[0292] Utilizing FLAG tags, a protein of interest in the culture supernatant was purified. An XK16/20 column (GE Healthcare, 28-9889-37) was filled with 2.5 mL of anti-M2-agarose resin (Sigma, A2220), and it was then equilibrated with D-PBS(−) (Wako Pure Chemical Industries, Ltd., 045-29795). Thereafter, the culture supernatant was loaded thereon, it was washed with D-PBS(−), and it was then eluted with D-PBS(−) containing 0.1 mg/mL FLAG peptide (Sigma, F3290). The resultant was monitored with the absorbance at 280 nm, and a fraction corresponding to the peak was then recovered. The molecular weight of the recovered protein was measured by SDS-PAGE and CBB staining, and it was then confirmed that the obtained molecular weight corresponded to the molecular weight of the protein of interest.

[0293] Using an ultrafiltration membrane (Amicon, UFC0801008), approximately 24 mL of the recovered fraction was concentrated to a volume of 2 mL, and then, using Hi Load 16/600 Superdex 200 pg (GE Healthcare, 28-9893-35), the fraction was purified by gel filtration chromatography. The column was equilibrated with D-PBS(−), and the recovered fraction was then loaded thereon, followed by elution with D-PBS(−). The resultant was monitored with the absorbance at 280 nm, and a fraction corresponding to the peak was then recovered. The molecular weight of the recovered protein was measured by SDS-PAGE and CBB staining.

### 39. Selection of Antibody

### 39-1. Production of Antigen Magnetic Beads

[0294] Using Dynabeads M-270 Carboxylic Acid (Life Technologies, 14305D) and Dynabeads M-270 Epoxy (Life Technologies, 14301) as magnetic beads, these beads were allowed to bind to the antigen in accordance with the instruction manual. At this time, MPC-S (Life Technologies, DBA13346) was used as a magnetic stand. Regarding Dynabeads M-270 Carboxylic Acid, 10 μL of beads were washed with 20 μL of 25 mM IVIES (pH 5.0) three times, and 10 μL of 50 mg/mL NHS solution and 10 μL of 50 mg/mL EDC solution were added to the resulting solution. The obtained mixture was reacted at room temperature for 30 minutes, and the reaction solution was then washed with 20 μL of 25 mM IVIES (pH 5.0) twice. A supernatant was removed from this magnetic beads suspension, and 10 μL of Plexin A4 protein solution, which had been adjusted to 0.6 mg/mL with 25 mM IVIES (pH 5.0), was then added to the suspension. The obtained mixture was reacted at 4° C. overnight, while being subjected to rotary stirring. Thereafter, a supernatant was removed from the reaction solution, and 20 μL of quenching buffer (50 mM Tris-HCl) was then added thereto, followed by the reaction of the mixture at room temperature for 15 minutes while being subjected to rotary stirring. Regarding Dynabeads M-270 Epoxy, 10 μL of beads were washed with 20 μL of 100 mM Na-phosphate buffer three times, and thereafter, 13.3 μL of Plexin A4 protein solution adjusted to 0.45 mg/ml with 100 mM Na-phosphate buffer and 6.7 μL of 100 mM Na-phosphate buffer containing 3 M ammonium sulfate were added and suspended therein. The obtained mixture was reacted at 37° C. overnight, while being subjected to rotary stirring. After the removal of a supernatant, the two types of beads were collectively suspended in 1 mL of selection buffer (PBS containing 1% BSA), and the obtained suspension was then washed with the same buffer as mentioned above three times. Thereafter, the resultant was suspended in 200 μL of selection buffer, and was then subjected to selection.

### 39-2. Selection by Antigen Magnetic Beads

[0295] An L15/H15 cell line, B7-3, was cultured in a medium containing 2.5 ng/mL TSA for 3 weeks. Thereafter, approximately 1×10⁸ cells were washed with 10 mL of selection buffer, and a supernatant was then removed from the reaction solution. The remaining solution was washed with 1 mL of selection buffer, and it was then suspended in 950 μL of selection buffer. To this cell suspension, 50 μL of the antigen magnetic beads prepared in 17-1 above was added, and the obtained mixture was then reacted at 4° C. for 30 minutes, while being stirred by rotation. Thereafter, using KingFisher mL (Thermo, 5400050), the reaction solution was washed with 0.5 mL of selection buffer three times. Thereafter, the recovered cells were suspended in 20 mL of medium, the suspension was then plated on a 9-cm dish, and it was then cultured in a CO₂ incubator for 7 days.

### 39-3. Screening by Flow Cytometry

[0296] The cell culture solution obtained in 39-2 above was recovered, and 3×10⁶ cells were then fractionated into a 1.5-mL tube. The cells were centrifuged to remove a supernatant, and the resulting cells were then washed with 1.5 mL of PBS to remove a supernatant. Using EZ-Link (registered trademark) NHS-PEG4-Biotinylation Kit (PIERCE, 21455), a biotin-labeled Plexin A4 protein was prepared, and 300 μL of primary staining solution (2.5 μg/mL biotin-labeled Plexin A4 protein solution was then added to the protein. The obtained mixture was left at rest at 4° C. under light-shielded conditions for 60 minutes. Thereafter, a supernatant was removed by centrifugation, and the resultant was then washed with 500 μL of PBS twice. After that, 300 μL of secondary staining solution, in which Goat Anti-Human IgG gamma chain specific R-FITC conjugated (Southern biotech, A2040-02) and Streptavidin PE conjugated (eBioscience, 12-4317-87) had been each diluted with buffer 1000 times and 500 times, respectively, was added to the resultant, and the obtained mixture was then left at rest at 4° C. under light-shielded conditions for 60 minutes. Thereafter, a supernatant was removed by centrifugation, and the resultant was then washed with 500 μL of PBS twice. The resultant was suspended in 500 μL of FACS buffer (containing PI solution (Invitrogen, P3566), which had been 1000 times diluted with PBS). This sample was subjected to a flow cytometric analysis. The results are shown in FIG. 36. A cell population, in which the signals of both Plexin A4 protein and IgGγ were high, was discovered in the P5 area.

### 39-4. Screening by Antigen-Immobilized ELISA Method

[0297] The cell culture supernatant obtained in 39-3 above was recovered, and a clone reacting with a Plexin A4 antigen was screened by an antigen-immobilized ELISA method using such a Plexin A4 antigen.

[0298] First, 20 μL of solution comprising a 2.5 μg/mL Plexin A4 antigen protein and a negative control that was a trypsin inhibitor (Sigma, T6522), streptavidin (Nacalai Tesque Inc., 32243) or ovalbumin (Sigma, A5503) was dispensed in an immuno 384-well plate Maxisorp (Nunc, 464718), and it was then reacted at 4° C. overnight, so that it was immobilized on the plate. Thereafter, the reaction mixture was washed with a washing solution (PBS containing 0.05% Tween 20) three times, and 45 μL of blocking solution (PBS containing 1% BSA) was then added thereto. The obtained mixture was reacted at room temperature for 1 hour. The resultant was washed with a washing solution three times, 25 μL of a measurement sample was then added thereto, and the obtained mixture was then reacted at room temperature for 1 hour. The resultant was washed with a washing solution three times, 25 μL of Goat anti-Human IgG-Fc HRP-conjugated (Bethyl, A80-104P), which had been 2000 times diluted with PBS buffer, was then added thereto, and the obtained mixture was then reacted for 1 hour. The resultant was washed with a washing solution three times, 25 μL of TMB+(Dako, S159985) was then added thereto, and the obtained mixture was then subjected to a coloring reaction for 5 minutes. Thereafter, 25 μL of 1 M sulfuric acid was added to the reaction mixture, so as to terminate the reaction. Using Infinite M1000 (TECAN), the absorbance at 450 nm was measured. The results are shown in FIG. 37. It was demonstrated that an antibody specifically reacting with Plexin A4 was generated in almost all of the clones.

[0299] According to screening in which the flow cytometry described in 39-3 above was combined with the antigen-immobilized ELISA method described in 39-4 above, a positive clone specifically binding to Plexin A4 could be identified. In addition to the case of B7-3, even in selections in which the L15/H30 cell line #11-6 and the L30/H30 cell line 7-7-48-10 were used, a positive clone specifically binding to Plexin A4 could be identified.

### 40. Confirmation of Expression of Anti-Plexin A4 Antibody

### 40-1. Analysis by ELISA

[0300] Among the positive clones identified in 39-5 above, regarding the positive clones #62 and #20, the concentrations of chicken IgM and human IgG₁ secreted into the culture supernatant were measured. Each cell line was suspended in a medium containing no chicken serum to result in 4×10⁵ cells/mL, and 1 mL each of the suspension was plated on a 24-well plate. The cells were cultured for 3 days, and the culture solution was recovered and was then filtrated through a 0.22-μm filter. Thereafter, the resulting cells were used in the measurement.

[0301] The method for measuring IgG is as follows. 100 μL of Goat anti-Human IgG-Fc affinity purified (Bethyl, A80-104A), which had been adjusted to 1.0 μg/mL by dilution with PBS, was dispensed in F96 Maxisorp Nunc Immunoplate (Nunc, 464718), and it was then reacted at 4° C. for 1 hour, so that it was immobilized on the plate. Thereafter, the reaction mixture was washed with a washing solution (PBS containing 0.05% Tween 20) five times, and 200 μL of blocking solution (PBS containing 1% BSA) was then added thereto. The obtained mixture was reacted at room temperature for 95 minutes. The resultant was washed with a washing solution five times, and 100 μL of a measurement sample or Human IgG1 Lambda-UNLB (Southern Biotech, 0151L-01) serving as a standard substance was then added thereto. The obtained mixture was reacted at room temperature for 1 hour. The resultant was washed with a washing solution five times, and 100 μL of Goat anti-Human IgG-Fc HRP conjugated (Bethyl, A80-104P), which had been 1000 times diluted with PBS, was then added thereto. The obtained mixture was reacted at room temperature for 1 hour. The resultant was washed with a washing solution three times, and 100 μL of TMB+(Dako, S159985) was then added thereto. The obtained mixture was subjected to a coloring reaction at room temperature for 3 minutes, and 20 μL of 1 M sulfuric acid was then added thereto, so as to terminate the reaction. Using Infinite M1000 (TECAN), the absorbance at 450 nm was measured.

[0302] The method for measuring IgM is as follows. 100 μL of Goat anti-chicken IgM (Bethyl, A30-102A), which had been diluted with PBS to 1.0 μg/mL, was dispensed in F96 Maxisorp Nunc Immunoplate (Nunc, 439454), and it was then reacted at 4° C. overnight, so that it was immobilized on the plate. Thereafter, the reaction mixture was washed with a washing solution (PBS containing 0.05% Tween 20) five times, and 200 μL of blocking solution (PBS containing 1% BSA) was then added thereto. The obtained mixture was reacted at room temperature for 95 minutes. The resultant was washed with a washing solution five times, and 100 μL of chicken serum (GIBCO, 16110) serving as a measurement sample or a standard substance was added thereto. The obtained mixture was reacted at room temperature for 1 hour. The resultant was washed with a washing solution five times, and 100 of Goat anti-chicken IgM HRP conjugated (Bethyl, A30-102P), which had been 5000 times diluted with PBS containing 1% BSA and 0.05% Tween 20, was then added thereto. The obtained mixture was reacted at room temperature for 1 hour. The resultant was washed with a washing solution five times, and 100 μL of TMB+(Dako, S159985) was then added thereto. The obtained mixture was subjected to a coloring reaction at room temperature for 3 minutes, and 100 μL of 1 N sulfuric acid was then added thereto, so as to terminate the reaction. Using Infinite M1000 (TECAN), the absorbance at 450 nm was measured.

[0303] The measurement results are shown in Table 37. It was confirmed that human IgG₁ was secreted from the clone #20 and the clone #62, and that the secretion level of chicken IgM was extremely small

TABLE 37

| Clone name | IgG (μg/mL) | IgM (μg/mL) |
|---|---|---|
| #62 | 5.79 | 0.186 |
| #20 | 1.54 | 0.231 |

### 40-2. Analysis by Western Blotting

[0304] Antibodies secreted from the positive clones #62 and #20, which produce the antigen-reactive antibody obtained in 17-4 above, were analyzed according to Western blotting.

[0305] Each cell line was suspended in a medium containing no chicken serum to result in 4×10⁵ cells/mL, and 1 mL each of the suspension was plated on a 24-well plate. The cells were cultured for 3 days, and the culture solution containing the cell line was recovered and was then filtrated through a 0.22-μm filter (Millipore, SLGV J13 SL). For detection of Igγ and Igλ, a sample purified with a Protein A column was used, and for detection of IgM, a sample before purification was used. To a sample used in detection under reduction conditions (reduction sample), Tris-SDS-β-mercaptoethanol sample treatment solution (COSMO BIO Co., Ltd., 423437) was added in an equal amount of the aforementioned sample. On the other hand, to a sample used in detection under non-reduction conditions (non-reduction sample), Tris-SDS sample treatment solution (COSMO BIO Co., Ltd., 423420) was added in an equal amount of the aforementioned sample. Thereafter, the reduction sample was reacted at 98° C. for 3 minutes, and the non-reduction sample was reacted at 37° C. for 30 minutes. Thereafter, the sample was electrophoresed on a 4% to 20% polyacrylamide gel (COSMO BIO Co., Ltd., 414879), and it was then transcribed on a nylon membrane. After that, it was blocked with a blocking buffer (PBS containing 1% BSA), and was then reacted with a primary antibody (Goat Anti-Human IgG-Fc Fragment Ab-HRP (Bethyl, A80-104P), Goat Anti-Human IgG Lambda-HRP (Southern Biotech, 2070-05), and Goat Anti-chicken IgM-HRP (Bethyl, A30-102P). The resultant was washed with PBS containing 0.1% Tween 20 three times, and then, chicken IgM, human Igγ (heavy chain), and human Igλ (light chain) were detected by chemiluminescence using ECL plus (GE Healthcare, RPN2132). The results are shown in FIG. 38 to FIG. 40. According to Western blotting using an anti-Igγ antibody, a band of 55 kDa was detected under reduction conditions, and a band of approximately 160 kDa was detected under non-reduction conditions (FIG. 38). According to Western blotting using an anti-Igλ antibody, a band of 25 kDa was detected under reduction conditions, and a band of approximately 160 kDa was detected under non-reduction conditions (FIG. 39). Moreover, according to Western blotting using an anti-IgM antibody, no signals were detected (FIG. 40).

[0306] From these results, it was confirmed that the antibody produced by the obtained positive clone is a full-length human antibody.

### Antibody Selection 2

### 41. Preparation of Antigen

[0307] Semaphorin 3A (Sema3A) was selected as an antigen protein. Sema3A is a molecule belonging to the Sema3 family, and has been known as a factor for controlling axon extension in the sensory nerve or the sympathetic nerve.

[0308] As an antigen, His-AP-hSema3A (SEQ ID NO: 183), in which a His tag and human alkaline phosphatase (AP) were added to the N-terminus of Sema3A, was used. A cell line HEK293 stably expressing this protein was provided by Department of Molecular Pharmacology & Neurobiology, Yokohama City University, Graduate School of Medicine.

[0309] The expression was carried out at 4 L-scale, and the culture was carried out for 4 days. Utilizing His tags, a protein of interest in the culture supernatant was purified. 5 mL of HisTrap EXCEL (GE Healthcare, 17-3712-06) was equilibrated with Solution A (20 mM Na-phosphate, 150 mM NaCl, 20 mM Imidazole (pH 7.5)), a culture supernatant was then loaded thereon, and it was then washed with Solution A. Thereafter, elution was carried out by gradient elution in which Solution A was linearly replaced with Solution B (20 mM Na-phosphate, 150 mM NaCl, 500 mM Imidazole (pH 7.5)) at 25 column volumes. The resultant was monitored with the absorbance at 280 nm, and a fraction corresponding to the peak was then recovered. The molecular weight of the recovered protein was measured by SDS-PAGE and CBB staining, and it was then confirmed that the obtained molecular weight corresponded to the molecular weight of the protein of interest.

[0310] Using an ultrafiltration membrane (Amicon, UFC0801008), approximately 80 mL of the recovered fraction was concentrated to a volume of 1.5 mL, and then, using Hi Load 16/600 Superdex 200 pg (GE Healthcare, 28-9893-35), the fraction was purified by gel filtration chromatography. The column was equilibrated with an elution buffer (50 mM Na-phosphate, 300 mM NaCl, 400 mM Arginine, pH 7.0), and the recovered fraction was then loaded thereon, followed by elution with the elution buffer. The resultant was monitored with the absorbance at 280 nm, and a fraction corresponding to the peak was then recovered. The molecular weight of the recovered protein was measured by SDS-PAGE and CBB staining. Subsequently, in order to remove arginine from the eluant, the second gel filtration chromatography was carried out with D-PBS(−). Similarly, the resultant was monitored with the absorbance at 280 nm, and a fraction corresponding to the peak was then recovered. The molecular weight of the recovered protein was measured by SDS-PAGE and CBB staining.

### 42. Selection of Antibody

### 42-1. Production of Antigen Magnetic Beads

[0311] Using Dynabeads M-270 Carboxylic Acid (Life Technologies, 14305D), Dynabeads M-270 Epoxy (Life Technologies, 14301), and Dynabeads His-Tag Isolation & Pulldown (Life Technologies, 10103D) as magnetic beads, these beads were allowed to bind to the antigen in accordance with the instruction manual. At this time, MPC-S(Life Technologies, DBA13346) was used as a magnetic stand. Regarding Dynabeads M-270 Carboxylic Acid, 40 μL of beads were washed with 80 μL of 25 mM IVIES (pH 5.0) three times, and 40 μL of 50 mg/mL NHS solution and 40 μL of 50 mg/mL EDC solution were added to the resulting beads. The obtained mixture was reacted at room temperature for 30 minutes, and the reaction solution was then washed with 80 μL of 25 mM IVIES (pH 5.0) twice. A supernatant was removed from this magnetic beads suspension. For positive selection, 50.6 μL of His-AP-hSema3A protein solution, which had been adjusted to 0.475 mg/ml with 25 mM MES (pH 5.0), was added to the above-obtained solution to make a suspension. For negative selection, PBS was used instead of the antigen solution, and 50.6 μL of the solution diluted with 25 mM IVIES (pH 5.0) was added to the above-obtained solution to make a suspension. The obtained suspension was reacted at 4° C. overnight, while being subjected to rotary stirring. Thereafter, a supernatant was removed from the reaction solution, and 80 μL of quenching buffer (50 mM Tris-HCl) was then added thereto, followed by the reaction of the mixture at room temperature for 15 minutes while being subjected to rotary stirring. Regarding Dynabeads M-270 Epoxy, 40 μL of beads were washed with 80 μL of 100 mM Na-phosphate buffer three times. Thereafter, for positive selection, 53.3 μL of His-AP-hSema3A protein solution adjusted to 0.45 mg/ml with a 100 mM Na-phosphate buffer and 26.7 μL of 100 mM Na-phosphate buffer containing 3 M ammonium sulfate were added to the above-obtained beads to make a suspension, and for negative selection, PBS was used instead of the antigen solution, and 53.3 μL of the solution diluted with 25 mM IVIES (pH 5.0) and 26.7 μL of 100 mM Na-phosphate buffer containing 3 M ammonium sulfate were added to the above-obtained beads to make a suspension. The obtained suspension was reacted at 37° C. overnight, while being subjected to rotary stirring. Regarding Dynabeads His-Tag Isolation & Pulldown, 8 μL of beads were washed with 80 μL of PBS three times. Thereafter, for positive selection, 101.9 μL of His-AP-hSema3A protein solution having an antigen concentration of 4.49 μM was added to the above-obtained beads to make a suspension, and for negative selection, 101.9 μL of PBS was used instead of the antigen solution, and it was then added to the above-obtained beads to make a suspension. The obtained suspension was reacted at 4° C. for 10 minutes, while being subjected to rotary stirring. After the removal of a supernatant, the three types of beads were collectively suspended in 1 mL of selection buffer (PBS containing 1% BSA), and the obtained suspension was then washed with the same buffer as mentioned above three times. Thereafter, the resultant was suspended in 200 μL of selection buffer, and was then subjected to selection.

### 42-2. Selection by Antigen Magnetic Beads

[0312] An L15/H15 cell line, B7-3, was cultured in a medium containing 2.5 ng/mL TSA for 86 days. Thereafter, approximately 1.5×10⁷ cells were washed with 10 mL of selection buffer, and a supernatant was then removed from the reaction solution. The remaining solution was washed with 1 mL of selection buffer, and it was then suspended in 950 μL of selection buffer. To this cell suspension, 50 μL of the antigen magnetic beads for negative selection prepared in 39-1 above was added, and the obtained mixture was then reacted at 4° C. for 30 minutes, while being stirred by rotation. Thereafter, using KingFisher mL (Thermo, 5400050), the magnetic beads were removed. Subsequently, to this cell suspension, 50 μL of the antigen magnetic beads for positive selection was added, and the obtained mixture was then reacted at 4° C. for 30 minutes, while being stirred by rotation. Thereafter, using KingFisher mL (Thermo, 5400050), the reaction solution was washed with 1.7 mL of selection buffer three times. Thereafter, the recovered cells were suspended in 20 mL of medium, the suspension was then plated on a 96-well plate, and it was then cultured in a CO₂ incubator.

### 42-3. Primary Screening

[0313] The cell culture solution obtained in 42-2 above was recovered, and a clone specifically reacting with a target antigen was screened based on the antigen reactivity of secretory IgG in antigen-immobilized ELISA. 20 μL of antigen protein and negative control antigen solution (His-Ubiquitin, Ovalbumin, Streptavidin), which had been adjusted to 2.5 μg/mL with PBS, was dispensed on an immuno 384-well plate Maxisorp (Nunc, 464718), and it was then reacted at 4° C. overnight, so that it was immobilized thereon. The resultant was washed with a washing solution (PBS containing 0.05% Tween 20) five times, and 45 μL of a blocking solution (PBS containing 1% BSA) was then added thereto. The obtained mixture was reacted at room temperature for 115 minutes. The reaction mixture was washed with a washing solution five times, and 25 μL of culture supernatant was then added thereto. The obtained mixture was reacted at room temperature 130 minutes. Thereafter, the resultant was washed with a washing solution five times, and 25 μL of Goat anti-Human IgG-Fc HRP-conjugated, which had been 2000 times diluted with a blocking solution, was added thereto. The obtained mixture was reacted at room temperature 47 minutes. The resultant was washed with a washing solution five times, 25 μL of TMB+(Dako, S159985) was then added thereto, and the obtained mixture was then reacted for 5 minutes. Thereafter, 25 μL of 1 N sulfuric acid was added to the reaction mixture, so as to terminate the reaction, and then, using a microplate reader, the absorbance at 450 nm was measured (FIG. 41). The cell having an absorbance of 0.1 or more and an S/N ratio of 5 or more was determined to be a positive cell, and it was then subjected to secondary screening

### 42-4. Secondary Screening

[0314] The cell culture supernatant obtained in 42-3 above was recovered, and it was then subjected to the secondary screening according to antigen-immobilized ELISA based on the method described in 42-3 above. The cell having an absorbance of 0.5 or more and an S/N ratio of 5 or more was determined to be a positive cell, and it was then subjected to monocloning

42-5. Primary Screening after Monocloning

[0315] The cell culture supernatant obtained in 42-4 above was recovered, and it was then subjected to screening according to antigen-immobilized ELISA based on the method described in 42-3 above. The cell having an absorbance of 0.2 or more and an S/N ratio of 5 or more was determined to be a positive cell, and it was then subjected to secondary screening.

42-6. Secondary Screening after Monocloning

[0316] The cell culture supernatant obtained in 42-5 above was recovered, and it was then subjected to screening according to antigen-immobilized ELISA based on the method described in 42-3 above. Positive clones #64, #69 and #77, which had an absorbance of 0.5 or more and an S/N ratio of 5 or more, were selected (FIG. 42).

### 43. Confirmation of Expression of Anti-his-AP-hSema3A Antibody

### 43-1. Analysis by ELISA

[0317] Among the positive clones selected in 42-6 above, regarding the positive clone #64, the concentrations of chicken IgM and human IgG₁ secreted into the culture supernatant were measured. The measurement method was as described in 40-1 above.

[0318] The measurement results are shown in Table 38. It was confirmed that, as with wild-type DT40, human IgG was secreted from the positive clone #64, and that secretion of chicken IgM was not observed.

TABLE 38

| Clone name | IgG (μg/mL) | Chicken IgM (μg/mL) |
|---|---|---|
| #64 | 2.66 | <0.0005 |

### 43-2. Analysis by Western Blotting

[0319] According to Western blotting, an antibody secreted from the positive clone #64 producing an antigen-reactive antibody obtained in 42-6 above was analyzed.

[0320] Each cell line was suspended in a medium containing no chicken serum to result in 4×10⁵ cells/mL, and 20 mL of the suspension was plated on a 9-cm dish. The cells were cultured for 4 days, and the culture solution containing the cell line was recovered and was then filtrated through a 0.22-μm filter (Millipore, SLGV J13 SL). For detection of Igγ and Igλ, a sample purified with a Protein A column was used, and for detection of IgM, a sample before purification was used. To a sample used in detection under reduction conditions (reduction sample), Tris-SDS-β-mercaptoethanol sample treatment solution (COSMO BIO Co., Ltd., 423437) was added in an equal amount of the aforementioned sample. On the other hand, to a sample used in detection under non-reduction conditions (non-reduction sample), Tris-SDS sample treatment solution (COSMO BIO Co., Ltd., 423420) was added in an equal amount of the aforementioned sample Thereafter, the reduction sample was reacted at 98° C. for 3 minutes, and the non-reduction sample was reacted at 37° C. for 30 minutes. Thereafter, the sample was electrophoresed on XV PANTERA 5-20% T-HCL 10W (DRC, NXV-275HP), and it was then transcribed on a PVDF membrane. After that, it was blocked with a blocking buffer (TB S containing 5% skimmed milk and 0.1% Tween 20), and was then reacted with a primary antibody (Goat Anti-Human IgG-Fc Fragment Ab-HRP (Bethyl, A80-104P) and Goat Anti-Human IgG Lambda-HRP (Southern Biotech, 2070-05)). The resultant was washed with TBS containing 0.1% Tween 20 three times, and then, chicken IgM, human Igγ (heavy chain), and human Igλ (light chain) were detected by chemiluminescence using Luminata Forte Western HRP substrate (Millipore, WBLUF0100). The results are shown in FIG. 43. According to Western blotting using an anti-Igγ antibody, a band of 55 kDa was detected under reduction conditions (FIG. 43A), and a band of approximately 160 kDa was detected under non-reduction conditions (FIG. 43B). According to Western blotting using an anti-Igλ antibody, a band of 25 kDa was detected under reduction conditions (FIG. 43C), and a band of approximately 160 kDa was detected under non-reduction conditions (FIG. 43D).

[0321] From these results, it was confirmed that the antibody produced by the obtained positive clone is a full-length human antibody.

### Antibody Selection 3

### 44. Preparation of Antigen

[0322] IL-8 was selected as an antigen protein. IL-8 is one type of chemokine. IL-8 exhibits chemotaxis to neutrophils and T lymphocytes, and has an activity of promoting adhesion of leucocytes to vascular endothelial cells or the functions of neutrophils. Hence, it is considered that IL-8 is associated with inflammatory disease, rheumatoid arthritis and other diseases, which are attended with infiltration of neutrophils.

[0323] As antigens, human IL-8 (Immune TECH, IT-401-003P) was used in selection, and two types of human IL-8 (Immune TECH, IT-401-003P, and CELL Signaling Technology, 8921LF) were used in screening.

### 45. Selection of Antibody

### 45-1. Production of Antigen Magnetic Beads

[0324] Using Dynabeads M-270 Carboxylic Acid (Life Technologies, 14305D), Dynabeads M-270 Epoxy (Life Technologies, 14301) and Dynabeads His-Tag Isolation & Pulldown (Life Technologies, 10103D) as magnetic beads, these beads were allowed to bind to the antigen in accordance with the instruction manual. At this time, MPC-S(Life Technologies, DBA13346) was used as a magnetic stand. Regarding Dynabeads M-270 Carboxylic Acid, 35 μL of beads were washed with 70 μL of 25 mM IVIES (pH 5.0) three times, and 35 μL of 50 mg/mL NHS solution and 35 μL of 50 mg/mL EDC solution were added to the resulting beads. The obtained mixture was reacted at room temperature for 30 minutes, and the reaction solution was then washed with 70 μL of 25 mM IVIES (pH 5.0) twice. A supernatant was removed from this magnetic beads suspension. For positive selection, 35 μL of IL-8 (Immune TECH, IT-401-003P) protein solution adjusted to 0.6 mg/ml with 25 mM IVIES (pH 5.0) was added to the above-obtained solution to make a suspension. For negative selection, PBS was used instead of the antigen solution, and 35 μL of the solution diluted with 25 mM IVIES (pH 5.0) was added to the above-obtained solution to make a suspension. The obtained suspension was reacted at 4° C. overnight, while being subjected to rotary stirring. Thereafter, a supernatant was removed from the reaction solution, and 70 μL of quenching buffer (50 mM Tris-HCl) was then added thereto, followed by the reaction of the mixture at room temperature for 15 minutes while being subjected to rotary stirring. Regarding Dynabeads M-270 Epoxy, 35 μL of beads were washed with 70 μL of 100 mM Na-phosphate buffer three times. Thereafter, for positive selection, 46.7 μL of IL-8 protein solution adjusted to 0.45 mg/ml with a 100 mM Na-phosphate buffer and 23.3 μL of 100 mM Na-phosphate buffer containing 3 M ammonium sulfate were added to the above-obtained solution to make a suspension, and for negative selection, PBS was used instead of the antigen solution, and 46.7 μL of the solution diluted with 100 mM Na-phosphate buffer and 23.3 μL of 100 mM Na-phosphate buffer containing 3 M ammonium sulfate were added to the above-obtained solution to make a suspension. The obtained suspension was reacted at 37° C. overnight, while being subjected to rotary stirring. Regarding Dynabeads His-Tag Isolation & Pulldown, 7 μL of beads were washed with 70 μL of PBS three times. Thereafter, for positive selection, 70 μL of IL-8 protein solution having an antigen concentration of 5.75 μM was added to the above-obtained solution to make a suspension, and for negative selection, 70 μL of PBS was used instead of the antigen solution, and it was added to the above-obtained solution to make a suspension. The obtained suspension was reacted at 4° C. for 210 minutes, while being subjected to rotary stirring. After the removal of a supernatant, the three types of beads were collectively suspended in 1 mL of a selection buffer (PBS containing 1% BSA), and the obtained suspension was then washed with the same buffer as mentioned above three times. Thereafter, the resultant was suspended in 700 μL of selection buffer, and was then subjected to selection.

### 45-2. Selection by Antigen Magnetic Beads

[0325] An L30/H15f15f15f cell line, 2-1-3, was cultured in a medium containing 2.5 ng/mL TSA for 45 days. Thereafter, approximately 1.5×10⁷ cells were washed with 10 mL of selection buffer, and a supernatant was then removed from the reaction solution. The remaining cells were washed with 10 mL of selection buffer, and it was then suspended in 950 μL of selection buffer. To this cell suspension, 50 μL of the antigen magnetic beads for negative selection prepared in 39-1 above was added, and the obtained mixture was then reacted at 4° C. for 30 minutes, while being stirred by rotation. Thereafter, using KingFisher mL (Thermo, 5400050), the magnetic beads were removed. Subsequently, to this cell suspension, 50 μL of the antigen magnetic beads for positive selection was added, and the obtained mixture was then reacted at 4° C. for 30 minutes, while being stirred by rotation. Thereafter, using KingFisher mL (Thermo, 5400050), the reaction solution was washed with 1.7 mL of selection buffer three times. Thereafter, the recovered cells were suspended in 20 mL of medium, the suspension was then plated on a 96-well plate, and it was then cultured in a CO₂ incubator.

### 45-3. Screening and Identification of Positive Clones

[0326] In the same matter as described in 42-3 to 42-6 above, two times of screening, monocloning, and two times of screening were carried out to obtain positive clone #117, #121 and #123. The results of the primary screening after completion of the selection are shown in FIG. 44, and the results of the secondary screening after completion of the monocloning are shown in FIG. 45.

### 46. Confirmation of Expression of Anti-IL-8 Antibody

### 46-1. Analysis by ELISA

[0327] Regarding the positive clones #117 and #121 generating antigen-reactive antibodies obtained in 45-3 above, the concentrations of chicken IgM and human IgG₁ secreted into the culture supernatant were measured. The measurement method was as described in 40-1 above.

[0328] The measurement results are shown in Table 39. It was confirmed that, as with wild-type DT40, human IgG was secreted from the positive clones #117 and #121, and that secretion of chicken IgM was not observed.

TABLE 39

| Clone name | IgG (μg/mL) | IgM (μg/mL) |
|---|---|---|
| #117 | 3.65 | <0.041 |
| #121 | 3.7 | <0.041 |

### 46-2. Analysis by Western Blotting

[0329] According to Western blotting, antibodies secreted from the positive clones #117 and #121 were analyzed. The method was as described in 40-2 above.

[0330] The results are shown in FIG. 46. According to Western blotting using an anti-Igγ antibody, a band of 55 kDa was detected under reduction conditions (FIG. 46A), and a band of approximately 160 kDa was detected under non-reduction conditions (FIG. 46B). According to Western blotting using an anti-Igλ antibody, a band of 25 kDa was detected under reduction conditions (FIG. 46C), and a band of approximately 160 kDa was detected under non-reduction conditions (FIG. 46D).

[0331] From these results, it was confirmed that the antibody produced by the obtained positive clone is a full-length human antibody.

### INDUSTRIAL APPLICABILITY

[0332] The present invention relates to a method for promptly producing a variety of human antibodies. Considering the importance of antibody drugs, it is anticipated that the technique provided by the present invention will play an extremely important role in the development of biotechnology-based pharmaceutical products exhibiting desired drug effects, in particular, antibody drugs, in the field of future drug discovery and medical services.

### SEQUENCE LISTING

### TPC0130CBS-sequencing_ST25.txt

The application's sequence listing, which the Patent Office published only in electronic form, follows.

SEQUENCE LISTING (183 sequences)

SEQ ID NO: 1 - DNA, 21 bp, Artificial Sequence
  Synthetic Primer
tccaccatggcctgggctctg

SEQ ID NO: 2 - DNA, 33 bp, Artificial Sequence
  Synthetic Primer
gttgagaacctatgaacattctgtaggggccac

SEQ ID NO: 3 - DNA, 54 bp, Artificial Sequence
  Synthetic Primer
attggcgcgcctctccaggttccctggtgcaggcacagtctgccctgactcagc

SEQ ID NO: 4 - DNA, 40 bp, Artificial Sequence
  Synthetic Primer
ttccatatgagcgactcacctaggacggtcagcttggtcc

SEQ ID NO: 5 - DNA, 334 bp, Homo sapiens
cagtctgccctgactcagcctgcctccgtgtctgggtctcctggacagtcgatcaccatctcctgcactggaaccagcagtgacgttggtggttataactatgtctcctggtaccaacaaaacccaggcaaagcccccaaactcatgatttatgatgtcagtaatcggccctcagggatttctaatcgcttctctggctccaagtctggcaacacggcctccctgaccatctctgggctccaggctgacgacgaggctgattattactgcacctcatatacaaacgacagcaattctcaggtattcggcggagggaccaagctgaccgtcctag

SEQ ID NO: 6 - DNA, 51 bp, Artificial Sequence
  Synthetic Primer
attggcgcgcctctgcctctctcttgcaggtcagcccaaggctgccccctc

SEQ ID NO: 7 - DNA, 44 bp, Artificial Sequence
  Synthetic Primer
ggaattccatatggagtgggactactatgaacattctgtagggg

SEQ ID NO: 8 - DNA, 320 bp, Homo sapiens
gtcagcccaaggctgccccctcggtcactctgttcccgccctcctctgaggagcttcaagccaacaaggccacactggtgtgtctcataagtgacttctacccgggagccgtgacagtggcctggaaggcagatagcagccccgtcaaggcgggagtggagaccaccacaccctccaaacaaagcaacaacaagtacgcggccagcagctacctgagcctgacgcctgagcagtggaagtcccacagaagctacagctgccaggtcacgcatgaagggagcaccgtggagaagacagtggcccctacagaatgttcatag

SEQ ID NO: 9 - DNA, 20 bp, Artificial Sequence
  Synthetic Primer
gagatctcctcctcccatcc

SEQ ID NO: 10 - DNA, 20 bp, Artificial Sequence
  Synthetic Primer
caaaggacacgacagagcaa

SEQ ID NO: 11 - DNA, 28 bp, Artificial Sequence
  Synthetic Primer
tgtctcgagtgaaggtcaccaaggatgg

SEQ ID NO: 12 - DNA, 28 bp, Artificial Sequence
  Synthetic Primer
ttaagcttggagaggagagaggggagaa

SEQ ID NO: 13 - DNA, 1491 bp, Gallus gallus
tcgagtgaaggtcaccaaggatggagacttcagagctatctgggacacgtgttttaacgtttgatcagccttgcagcaaaacagtgttttgctctattgaacagtgttcaacaaaaacgatcagtggtctggaacacatctcctacgaagaaaggttgcgagagctgggtctggagaagaggaggctctggggcaacctccctgtggcctgtcagtgcttaaaggaggctcaagagaaagatggagagagactttatacacggagctgtagcaatatgacaaggagaaatggtttaaaatggaaagagggtagatttaggttagctatcaagaagaaattcttcactcagaggtgatgaagcactgtagcaggttgcccagagaagtattggatgcttccttcctggcagggcccaaggccagactggatgggttctgggcagcctgttctggtgggagatgtccctgcccgtggcacggcttggaaatgggtagcctttgaggtccctctcagcccaaatcattctatgttcttgtggttccctgcatttcagcctttgcctgttgactctggtgccactgttggacaattctactcagctgtgtttcatccctgccccaaagcagtaatcccatggataagcaatgctctgaggccttcaccaccatcagggctcctgctgaccctagcggcctcccttgcagcatgagccctttgttgtccgcactgctgctgctgagggtcctgccagccccccagggccttttctgcccaggcactgccacctgctaaaacccagcctgcccatggcagggcatcgcatgtctgagggatggaacggggcaagggcagtgctgcaggcagtggttcaagaaacgtttagatgttgtactgagggatgtggtttagtgggaaatactggtgataggtggatggttggactggaggatcttagaggtcttttccaaccttggtgattatgtgattctatgaagggagccatagcctgctcccatcatgccccgccagtccggctctcccgagcactttggttccgcagcatccaggcccgctctggggccggtgtgggcctgggtgctgccacgtgtccccgctgcaaggcctggccaaccccgctgtgccacaatgcaggggctgggctaggagtgggcagggaggtgtggggagaggtgtaggacgtggctgggagcgcagggagttatttgcataggggggcgtgctgcggaaggacgcgggtataaaagggcatcgaggtccccggcacagccccatcggcgtggggacacacagctgctgggattccgccatggcctgggctcctctcctcctggcggtgctcgcccacacctcaggtactcgttgcgcccggtcggggactgtgggcacggggctctgtcccactgctgcgcgggcagggctgtgcgtgcggggccgtcactgattgccgttttctcccctctctcctctcc

SEQ ID NO: 14 - DNA, 1712 bp, Gallus gallus
tctagagacctcgtctcggtctttcttcccccatcgtgaaattgtgacattttgtcgatttttggtgatttgggggtttttcttggacttggcggcaggctggggtctgccaccggcgcagggccgggcactcagcgcgacagcctgggctgagtcttgtccccaccgagccggagggctccggtgtgcgccatggaggacttagggttattttgtcaatggaaagttcttaaaatttgaccagaaaatgtgcccgaggtctgtctctgccacacgatttcagaaattgtgtctaggtcgatgagaagacagtttttgtctttgtcaggaaattagttgtgagttgttagtccttccctcttagtcctaaggactaagacctttgtccccggtctggtctctcactggggactcttggctccagtgccatggggagcccaagtgtcactgacacggtgtccttgggggtgaaattcagtttttcagctgtccaggtaagtgctgtcaaaaaatggaggttattctgctgaaaaagctgagaggaatattttgtcatttttttcggaaatatatatatatatatatatataaatatataaattatttatatattttatatatatatatatataaaatatatgtatttctctctttctttttatatatatatataaatatatatatatttctccctctttctttatatatatttatagggagagaatctatatttttggccaatttggccaatttctctctctctctctttatatatatatatatatgtatatgtaatttatatatatatatataaatttatatttatttatttatttatttatatagattatttttatatacatatatatatataaatttggccaatttagaagaaattggccaaaaaaacccaatctgaaccaaattacttagggcataagtccaaaaaaaaagtgcagttcaagaattcctcgctggaaagtttttaatgggggcagttcttccccattttctggtgtagatatgagtgaagatatagatatgtatgtagatatagatttggctatagtttgtttgatgaacagtctgaggaagagtaaatcttgccttcctcatggcaatttttaattctacttcttctgagacaagtctgaacatgccttgaggtagaaagagcccgaaaattgagtgctttttctttgaaattttaattaaaattaaaaaatagccttacagcaggaaagaaagggggtgatggcagctaatcggagttccaaagctgaaccacgttcacccaaacacgtggttgaaattttgtgtgtgtatatatataaatatatatatgtatacaaaagaaaatgcctatatataaaaaaattgttatgtatattatatagatttattatagatatgtacataagatataacacgtatacatatatatgtagtctgctgtatgctttgtataaatttttatagatatgatgtatattatatgcatgggttatatatctataatatattttatctgtagaaggaactacagtataaaatgcatatatgcgtatatatacacatatttatatatatgtgtatatatatgtatacgcacacgtataacatccatgaaaatagatatggatgggtggatgtgtttgttttacagaggtgcatgtgtgtctgtacatacacagccatacatacgcgtgtgg

SEQ ID NO: 15 - DNA, 1992 bp, Gallus gallus
acgacactgaactagtgctgactctgcatccatgtctctgtgtccttttgcgtgctgtctgcatctcacacaggggggtcggccccagtatggggaagggctggggggcgcatacacacatattggtaatgttgggggcggggggggggggtgggggggtcaacagatcagcactggagacactggtgtataccctggcaccaccaacatctaaggcagggtgctttggggcaattttggggcagtttaaggtctgtgctggcactgagcacgtggctgtggccgtgctgtcctcatctcccacccactacggtctgtgcgccaggtccctagcagagatttgctttatgctgggaacagggggagttctggctctgttcccttgcattcagacaccctggtgccccctgggtgggatgtcagtgtgaatactcctttgtgccctgtgcctgcagcagcctgaccctccacacaccacacgccttgtgtgcaccccacccctgtcactatccctctccccgctccccagggagattttgcagtggcccctgtagggcagcttttagcacagcccccagcagcaagcaagcagaaagcactgctgtgcacagcttgtcagctgtgtgtgtttgctgaggaggatctgtcttttgctgaggccatcagtcttgtcctgctcaacctccatcgatgctgcccacctcaacacatctacccatctattccatctacaccaacatctccattcatcccacccacccaaacatgtccatccatcacaacacctccatccaacccgcacactccagcacctccaatcattccatctacaccaccatgctgatctgctacagccactccaacgcaaccgtccattccatctacaccaatgtccatccatcccagccactccagcacctccagccatcccacccaccctatgtctccatccagccactggtggggtgcaggacatggggccagctctactgtcaggactggggtttttgcatggccccataccacttctgcagaagagacgcactgaaagtttggctgaccattttctccacggtagagttgtggcagttctgtaatttagggtcttttatccagtttggagatgggctgggatctcccagctccatggcaggcattcatgacactgggtttagtatctgatgggtgggatgtggctgaacttcattttctttccccagtgacaaagtttttgcagttgaatatgaattcctgctttctgctctatgagttgtttttttcccaggacgtacacagggaatcagcagtcttcattctccctctgccatgtgtagactctctgccacacaggactgtgctgtcctcatgcccctgcgcccaaattgctgccctctgcccatgcctgccaagctgagccctgcaggctgccatgctggattgacatgagccctgagattggtacagaaatggtgattttggggttttctttgcactcaggaagctgaaggctcaatgctcagtgatggatttaccaaactgtgccctgaggcagctgctcatgctggataaagtcactggagcacagggaaccaggcgctgggcagggatttctcatgggccccacttggaaagctgcaggctgcaaacctggctctgccttcacgcctcaccctcatgaggacaacctcactaattattgattaaaagattttgctaaaccatctccagaagcaacaacccactgaggagcatgtgctgaattatacatcacagctccacggccctgccctcatagcagggctgcatggcacccacagtggcactcagagggaccacagggctgagacagccgggtctggtggtggggacacagctgagcataggatgagccccccgggcagtgctgggctttgctaatgagcagaagtatggatagaaagcaaccccagggctccgtacccagctgcagctcttgctctgtcgtgtcctttg

SEQ ID NO: 16 - DNA, 11734 bp, Artificial Sequence
  Targeting vector
cacctgacgcgccctgtagcggcgcattaagcgcggcgggtgtggtggttacgcgcagcgtgaccgctacacttgccagcgccctagcgcccgctcctttcgctttcttcccttcctttctcgccacgttcgccggctttccccgtcaagctctaaatcgggggctccctttagggttccgatttagtgctttacggcacctcgaccccaaaaaacttgattagggtgatggttcacgtagtgggccatcgccctgatagacggtttttcgccctttgacgttggagtccacgttctttaatagtggactcttgttccaaactggaacaacactcaaccctatctcggtctattcttttgatttataagggattttgccgatttcggcctattggttaaaaaatgagctgatttaacaaaaatttaacgcgaattttaacaaaatattaacgcttacaatttccattcgccattcaggctgcgcaactgttgggaagggcgatcggtgcgggcctcttcgctattacgccagctggcgaaagggggatgtgctgcaaggcgattaagttgggtaacgccagggttttcccagtcacgacgttgtaaaacgacggccagtgagcgcgcgtaatacgactcactatagggcgaattgggtaccgggccccccctcgagtgaaggtcaccaaggatggagacttcagagctatctgggacacgtgttttaacgtttgatcagccttgcagcaaaacagtgttttgctctattgaacagtgttcaacaaaaacgatcagtggtctggaacacatctcctacgaagaaaggttgcgagagctgggtctggagaagaggaggctctggggcaacctccctgtggcctgtcagtgcttaaaggaggctcaagagaaagatggagagagactttatacacggagctgtagcaatatgacaaggagaaatggtttaaaatggaaagagggtagatttaggttagctatcaagaagaaattcttcactcagaggtgatgaagcactgtagcaggttgcccagagaagtattggatgcttccttcctggcagggcccaaggccagactggatgggttctgggcagcctgttctggtgggagatgtccctgcccgtggcacggcttggaaatgggtagcctttgaggtccctctcagcccaaatcattctatgttcttgtggttccctgcatttcagcctttgcctgttgactctggtgccactgttggacaattctactcagctgtgtttcatccctgccccaaagcagtaatcccatggataagcaatgctctgaggccttcaccaccatcagggctcctgctgaccctagcggcctcccttgcagcatgagccctttgttgtccgcactgctgctgctgagggtcctgccagccccccagggccttttctgcccaggcactgccacctgctaaaacccagcctgcccatggcagggcatcgcatgtctgagggatggaacggggcaagggcagtgctgcaggcagtggttcaagaaacgtttagatgttgtactgagggatgtggtttagtgggaaatactggtgataggtggatggttggactggaggatcttagaggtcttttccaaccttggtgattatgtgattctatgaagggagccatagcctgctcccatcatgccccgccagtccggctctcccgagcactttggttccgcagcatccaggcccgctctggggccggtgtgggcctgggtgctgccacgtgtccccgctgcaaggcctggccaaccccgctgtgccacaatgcaggggctgggctaggagtgggcagggaggtgtggggagaggtgtaggacgtggctgggagcgcagggagttatttgcataggggggcgtgctgcggaaggacgcgggtataaaagggcatcgaggtccccggcacagccccatcggcgtggggacacacagctgctgggattccgccatggcctgggctcctctcctcctggcggtgctcgcccacacctcaggtactcgttgcgcccggtcggggactgtgggcacggggctctgtcccactgctgcgcgggcagggctgtgcgtgcggggccgtcactgattgccgttttctcccctctctcctctccggcgcgcctctccaggttccctggtgcaggcacagtctgccctgactcagcctgcctccgtgtctgggtctcctggacagtcgatcaccatctcctgcactggaaccagcagtgacgttggtggttataactatgtctcctggtaccaacaaaacccaggcaaagcccccaaactcatgatttatgatgtcagtaatcggccctcagggatttctaatcgcttctctggctccaagtctggcaacacggcctccctgaccatctctgggctccaggctgacgacgaggctgattattactgcacctcatatacaaacgacagcaattctcaggtattcggcggagggaccaagctgaccgtcctaggtgagtcgctcatatgggatccataacttcgtatagcatacattatacgaagttatcagacatgataagatacattgatgagtttggacaaaccacaactagaatgcagtgaaaaaaatgctttatttgtgaaatttgtgatgctattgctttatttgtaaccattataagctgcaataaacaagttggggtgggcgaagaactccagcatgagatccccgcgctggaggatcatccagccggcgtcccggaaaacgattccgaagcccaacctttcatagaaggcggcggtggaatcgaaatctcgtagcacgtgtcagtcctgctcctcggccacgaagtgcttagccctcccacacataaccagagggcagcaattcacgaatcccaactgccgtcggctgtccatcactgtccttcactatggctttgatcccaggatgcagatcgagaagcacctgtcggcaccgtccgcaggggctcaagatgcccctgttctcatttccgatcgcgacgatacaagtcaggttgccagctgccgcagcagcagcagtgcccagcaccacgagttctgcacaaggtcccccagtaaaatgatatacattgacaccagtgaagatgcggccgtcgctagagagagctgcgctggcgacgctgtagtcttcagagatggggatgctgttgattgtagccgttgctctttcaatgagggtggattcttcttgagacaaaggcttggccatggtttagttcctcaccttgtcgtattatactatgccgatatactatgccgatgattaattgtcaacacgtgctgatcagatccgaaaatggatatacaagctcccgggagctttttgcaaaagcctaggcctccaaaaaagcctcctcactacttctggaatagctcagaggcagaggcggcctcggcctctgcataaataaaaaaaattagtcagccatggggcggagaatgggcggaactgggcggagttaggggcgggatgggcggagttaggggcgggactatggttgctgactaattgagatgcatgctttgcatacttctgcctgctggggagcctggggactttccacacctggttgctgactaattgagatgcatgctttgcatacttctgcctgctggggagcctggggactttccacaccctaactgacacacattccacagataacttcgtatagcatacattatacgaagttatggatccactagttctagagacctcgtctcggtctttcttcccccatcgtgaaattgtgacattttgtcgatttttggtgatttgggggtttttcttggacttggcggcaggctggggtctgccaccggcgcagggccgggcactcagcgcgacagcctgggctgagtcttgtccccaccgagccggagggctccggtgtgcgccatggaggacttagggttattttgtcaatggaaagttcttaaaatttgaccagaaaatgtgcccgaggtctgtctctgccacacgatttcagaaattgtgtctaggtcgatgagaagacagtttttgtctttgtcaggaaattagttgtgagttgttagtccttccctcttagtcctaaggactaagacctttgtccccggtctggtctctcactggggactcttggctccagtgccatggggagcccaagtgtcactgacacggtgtccttgggggtgaaattcagtttttcagctgtccaggtaagtgctgtcaaaaaatggaggttattctgctgaaaaagctgagaggaatattttgtcatttttttcggaaatatatatatatatatatatataaatatataaattatttatatattttatatatatatatatataaaatatatgtatttctctctttctttttatatatatatataaatatatatatatttctccctctttctttatatatatttatagggagagaatctatatttttggccaatttggccaatttctctctctctctctttatatatatatatatatgtatatgtaatttatatatatatatataaatttatatttatttatttatttatttatatagattatttttatatacatatatatatataaatttggccaatttagaagaaattggccaaaaaaacccaatctgaaccaaattacttagggcataagtccaaaaaaaaagtgcagttcaagaattcctcgctggaaagtttttaatgggggcagttcttccccattttctggtgtagatatgagtgaagatatagatatgtatgtagatatagatttggctatagtttgtttgatgaacagtctgaggaagagtaaatcttgccttcctcatggcaatttttaattctacttcttctgagacaagtctgaacatgccttgaggtagaaagagcccgaaaattgagtgctttttctttgaaattttaattaaaattaaaaaatagccttacagcaggaaagaaagggggtgatggcagctaatcggagttccaaagctgaaccacgttcacccaaacacgtggttgaaattttgtgtgtgtatatatataaatatatatatgtatacaaaagaaaatgcctatatataaaaaaattgttatgtatattatatagatttattatagatatgtacataagatataacacgtatacatatatatgtagtctgctgtatgctttgtataaatttttatagatatgatgtatattatatgcatgggttatatatctataatatattttatctgtagaaggaactacagtataaaatgcatatatgcgtatatatacacatatttatatatatgtgtatatatatgtatacgcacacgtataacatccatgaaaatagatatggatgggtggatgtgtttgttttacagaggtgcatgtgtgtctgtacatacacagccatacatacgcgtgtggcgcgcctctgcctctctcttgcaggtcagcccaaggctgccccctcggtcactctgttcccgccctcctctgaggagcttcaagccaacaaggccacactggtgtgtctcataagtgacttctacccgggagccgtgacagtggcctggaaggcagatagcagccccgtcaaggcgggagtggagaccaccacaccctccaaacaaagcaacaacaagtacgcggccagcagctacctgagcctgacgcctgagcagtggaagtcccacagaagctacagctgccaggtcacgcatgaagggagcaccgtggagaagacagtggcccctacagaatgttcatagtagtcccactccatatgtcccactggggatgcaatgtgaggacagtggttcctcaccctccctgtccctctgggccgctgctggtggcagcagccctcacttcccactcagatgtcccccaccgtgcccccatcacccacctctgcctgtcgactcctcttgccctcatctctccaggtgtcacattaataaacggatccataacttcgtataggatactttatacgaagttattttatttgtgaaatttgtgatgctattgctttatttgtaaccattataagctgcaataaacaagttggggtgggcgaagaactccagcatgagatccccgcgctggaggatcatccagccggcgtcccggaaaacgattccgaagcccaacctttcatagaaggcggcggtggaatcgaaatctcgtgatggcaggttgggcgtcgcttggtcggtcatttcgaaccccagagtcccgctcagaagaactcgtcaagaaggcgatagaaggcgatgcgctgcgaatcgggagcggcgataccgtaaagcacgaggaagcggtcagcccattcgccgccaagctcttcagcaatatcacgggtagccaacgctatgtcctgatagcggtccgccacacccagccggccacagtcgatgaatccagaaaagcggccattttccaccatgatattcggcaagcaggcatcgccatgggtcacgacgagatcctcgccgtcgggcatgcgcgccttgagcctggcgaacagttcggctggcgcgagcccctgatgctcttcgtccagatcatcctgatcgacaagaccggcttccatccgagtacgtgctcgctcgatgcgatgtttcgcttggtggtcgaatgggcaggtagccggatcaagcgtatgcagccgccgcattgcatcagccatgatggatactttctcggcaggagcaaggtgagatgacaggagatcctgccccggcacttcgcccaatagcagccagtcccttcccgcttcagtgacaacgtcgagcacagctgcgcaaggaacgcccgtcgtggccagccacgatagccgcgctgcctcgtcctgcagttcattcagggcaccggacaggtcggtcttgacaaaaagaaccgggcgcccctgcgctgacagccggaacacggcggcatcagagcagccgattgtctgttgtgcccagtcatagccgaatagcctctccacccaagcggccggagaacctgcgtgcaatccatcttgttcaatcatgcgaaacgatcctcatcctgtctcttgatcagatccgaaaatggatatacaagctcccgggagctttttgcaaaagcctaggcctccaaaaaagcctcctcactacttctggaatagctcagaggcagaggcggcctcggcctctgcataaataaaaaaaattagtcagccatggggcggagaatgggcggaactgggcggagttaggggcgggatgggcggagttaggggcgggactatggttgctgactaattgagatgcatgctttgcatacttctgcctgctggggagcctggggactttccacacctggttgctgactaattgagatgcatgctttgcatacttctgcctgctggggagcctggggactttccacaccctaaataacttcgtataggatactttatacgaagttatggatccacgacactgaactagtgctgactctgcatccatgtctctgtgtccttttgcgtgctgtctgcatctcacacaggggggtcggccccagtatggggaagggctggggggcgcatacacacatattggtaatgttgggggcggggggggggggtgggggggtcaacagatcagcactggagacactggtgtataccctggcaccaccaacatctaaggcagggtgctttggggcaattttggggcagtttaaggtctgtgctggcactgagcacgtggctgtggccgtgctgtcctcatctcccacccactacggtctgtgcgccaggtccctagcagagatttgctttatgctgggaacagggggagttctggctctgttcccttgcattcagacaccctggtgccccctgggtgggatgtcagtgtgaatactcctttgtgccctgtgcctgcagcagcctgaccctccacacaccacacgccttgtgtgcaccccacccctgtcactatccctctccccgctccccagggagattttgcagtggcccctgtagggcagcttttagcacagcccccagcagcaagcaagcagaaagcactgctgtgcacagcttgtcagctgtgtgtgtttgctgaggaggatctgtcttttgctgaggccatcagtcttgtcctgctcaacctccatcgatgctgcccacctcaacacatctacccatctattccatctacaccaacatctccattcatcccacccacccaaacatgtccatccatcacaacacctccatccaacccgcacactccagcacctccaatcattccatctacaccaccatgctgatctgctacagccactccaacgcaaccgtccattccatctacaccaatgtccatccatcccagccactccagcacctccagccatcccacccaccctatgtctccatccagccactggtggggtgcaggacatggggccagctctactgtcaggactggggtttttgcatggccccataccacttctgcagaagagacgcactgaaagtttggctgaccattttctccacggtagagttgtggcagttctgtaatttagggtcttttatccagtttggagatgggctgggatctcccagctccatggcaggcattcatgacactgggtttagtatctgatgggtgggatgtggctgaacttcattttctttccccagtgacaaagtttttgcagttgaatatgaattcctgctttctgctctatgagttgtttttttcccaggacgtacacagggaatcagcagtcttcattctccctctgccatgtgtagactctctgccacacaggactgtgctgtcctcatgcccctgcgcccaaattgctgccctctgcccatgcctgccaagctgagccctgcaggctgccatgctggattgacatgagccctgagattggtacagaaatggtgattttggggttttctttgcactcaggaagctgaaggctcaatgctcagtgatggatttaccaaactgtgccctgaggcagctgctcatgctggataaagtcactggagcacagggaaccaggcgctgggcagggatttctcatgggccccacttggaaagctgcaggctgcaaacctggctctgccttcacgcctcaccctcatgaggacaacctcactaattattgattaaaagattttgctaaaccatctccagaagcaacaacccactgaggagcatgtgctgaattatacatcacagctccacggccctgccctcatagcagggctgcatggcacccacagtggcactcagagggaccacagggctgagacagccgggtctggtggtggggacacagctgagcataggatgagccccccgggcagtgctgggctttgctaatgagcagaagtatggatagaaagcaaccccagggctccgtacccagctgcagctcttgctctgtcgtgtcctttggcggccgccaccgcggtggagctccagcttttgttccctttagtgagggttaattgcgcgcttggcgtaatcatggtcatagctgtttcctgtgtgaaattgttatccgctcacaattccacacaacatacgagccggaagcataaagtgtaaagcctggggtgcctaatgagtgagctaactcacattaattgcgttgcgctcactgcccgctttccagtcgggaaacctgtcgtgccagctgcattaatgaatcggccaacgcgcggggagaggcggtttgcgtattgggcgctcttccgcttcctcgctcactgactcgctgcgctcggtcgttcggctgcggcgagcggtatcagctcactcaaaggcggtaatacggttatccacagaatcaggggataacgcaggaaagaacatgtgagcaaaaggccagcaaaaggccaggaaccgtaaaaaggccgcgttgctggcgtttttccataggctccgcccccctgacgagcatcacaaaaatcgacgctcaagtcagaggtggcgaaacccgacaggactataaagataccaggcgtttccccctggaagctccctcgtgcgctctcctgttccgaccctgccgcttaccggatacctgtccgcctttctcccttcgggaagcgtggcgctttctcatagctcacgctgtaggtatctcagttcggtgtaggtcgttcgctccaagctgggctgtgtgcacgaaccccccgttcagcccgaccgctgcgccttatccggtaactatcgtcttgagtccaacccggtaagacacgacttatcgccactggcagcagccactggtaacaggattagcagagcgaggtatgtaggcggtgctacagagttcttgaagtggtggcctaactacggctacactagaaggacagtatttggtatctgcgctctgctgaagccagttaccttcggaaaaagagttggtagctcttgatccggcaaacaaaccaccgctggtagcggtggtttttttgtttgcaagcagcagattacgcgcagaaaaaaaggatctcaagaagatcctttgatcttttctacggggtctgacgctcagtggaacgaaaactcacgttaagggattttggtcatgagattatcaaaaaggatcttcacctagatccttttaaattaaaaatgaagttttaaatcaatctaaagtatatatgagtaaacttggtctgacagttaccaatgcttaatcagtgaggcacctatctcagcgatctgtctatttcgttcatccatagttgcctgactccccgtcgtgtagataactacgatacgggagggcttaccatctggccccagtgctgcaatgataccgcgagacccacgctcaccggctccagatttatcagcaataaaccagccagccggaagggccgagcgcagaagtggtcctgcaactttatccgcctccatccagtctattaattgttgccgggaagctagagtaagtagttcgccagttaatagtttgcgcaacgttgttgccattgctacaggcatcgtggtgtcacgctcgtcgtttggtatggcttcattcagctccggttcccaacgatcaaggcgagttacatgatcccccatgttgtgcaaaaaagcggttagctccttcggtcctccgatcgttgtcagaagtaagttggccgcagtgttatcactcatggttatggcagcactgcataattctcttactgtcatgccatccgtaagatgcttttctgtgactggtgagtactcaaccaagtcattctgagaatagtgtatgcggcgaccgagttgctcttgcccggcgtcaatacgggataataccgcgccacatagcagaactttaaaagtgctcatcattggaaaacgttcttcggggcgaaaactctcaaggatcttaccgctgttgagatccagttcgatgtaacccactcgtgcacccaactgatcttcagcatcttttactttcaccagcgtttctgggtgagcaaaaacaggaaggcaaaatgccgcaaaaaagggaataagggcgacacggaaatgttgaatactcatactcttcctttttcaatattattgaagcatttatcagggttattgtctcatgagcggatacatatttgaatgtatttagaaaaataaacaaataggggttccgcgcacatttccccgaaaagtgc

SEQ ID NO: 17 - DNA, 335 bp, Artificial Sequence
  Synthetic DNA
cagtctgccctgactcagcctgcctccgtgtctgggtctcctggacagtcgatcaccatctcctgcactggaaccagcagtgacgttggttataactatgtctcctggtaccaacaaaacccaggcaaagcccccaaactcatgatttatgatggtaatcggccctcagggatttctaatcgcttctctggctccaagtctggcaacacggcctccctgaccatctctgggctccaggctgacgacgaggctgattattactgcacctcatatacaaacgacagctctcaggtattcggcggagggaccaagctgaccgtcctaggtggcgcgcc

SEQ ID NO: 18 - DNA, 26 bp, Artificial Sequence
  Synthetic Primer
ttctgtgagctgagaaaaggagtgta

SEQ ID NO: 19 - DNA, 24 bp, Artificial Sequence
  Synthetic Primer
cctgcattgtggcacagcggggtt

SEQ ID NO: 20 - DNA, 2387 bp, Gallus gallus
tagatgggagtttaagagtgaattgtggtccatggcatatgcctgtcagcatagggatgctgtaggaattgcaccttggcttgagcccctctcctcctgatgatgcttgcccacagctctgatgtcctgggaaggctcactgcaccttgttgtcagtgaaactgcaataaactatcaagatttgatataattctgcccctctgttctacttgtgagaccacacctggagtactgcatccagttctggtaccactgcatccagttctggtaccaccaacacaaaaaggacatggagctgctggagcagggccagaggagggccatgaagatgaacagagggctgaagcacctcccctatggggacaggctgagagacatggggcttttgagactggagaagagaaggctccatgggacctttcagtgtccttccaatacttgaaagggtccttgaggaaagctggggagggacttcctataaggacatatagcaacaggacaaaaggaaagggttttaaactggaagaaagtagatttagtctagatagtaacaagaaattctttacagtaaggatcacgagacactgaaacaggttgcccaaagcagctgtggatgccccctccctggaagtgttccaggccaggctggatggggctttgagcaacctgttctagtgagaggtgaccctgcctacagcaggggagttgaacctagatggtcttaaatgtcccttccaacccaaatcattctatggcaattctatagagaacacctatgctgagagtagctacaagtatggctggttcctggcagtgcccctgtctctgtgatctatagcagcaccaacagaccctcaaacatcccttcacgattctccggttccaaatccggctccacacacacattaaccatcactggggtccaagccgatgacaaggctgtctattactgtgggagcacagacagcagctatgttggtatcacagtgacatggagcaattaaaaatgatgcataaccttttgcacatctgtaatgctataaggtgagagaaagtaagcaataatagcagagcagcacaatcctaggctacagcaaatgagaacaagcccagatgcagccacggaaataaagaaaaaaaaactgcttacctttagaaagcctcatatagacagggatctccagcaagatacccacacctccactgccaacccttaaatgagggctgggaagggctggatcctggctccacccctttcaatcactcaggtacattgcacacacctgagctcccctggctggccctgccttcccaccaggtgctcaatcactgctttgggctgtgactcagcatctccactacagcatcacagggagcggttgtcggtctctgctgttcctatgtgggtgccccgggacacctgaaggcatgagtggcagtgagggctcccagctctatccatggtgaacagacattatgtttatgctttacagcagcatgaatctggcagtggtgttattgctgtgatgctgctgtctatgctcccacagtaatagatagcctcgtcctcggcttggaccccagtgatggttaatgtgtttgtggagccggatccagaaccggagaatcgtgaagggatgtccgagggtctgttattgccattatagatcacagtgacaggggcactgccaggcatagtcgctgtaacccccggagcaggtgatctcgacggttcctcccaggtttgctgacaccgaggccggctgagtcagcgctgcctgcaccagggaacctggagagggagaggagagaggggagaaaatggatctgagcaattgcctgacacacacagccctccccagactgtgggatgaggccctgtgcccgcagtcacatgtggaatatcaagacacacacatctatgacaatcacaatctgattatcaaccactatggctggtaccagcagaaggcacctagcagtgcccctgtcactctgatctactatgatgatgagagaccctcgaacatcccttcacgattctccggttccaaatccggctccacacacacattaaccatcactggggtccaagccgacgacgaggctgtctattactgtgggaatgaagacagcagcggtactggtgccccagtgacacagagcaatggagatatgatacacagacctgacatctcagggagcagctggtcattatcctggtgacacaagtcccaggcatggcccagcactgtgctgcaggtggctatgccgggtgccctgctctgccctcctgtagagcctcaggactgtgcccatcactcagggaggagatggtcccagcagccctgtccctgccctgcactgcacttagctcctggacccca

SEQ ID NO: 21 - DNA, 1957 bp, Gallus gallus
atattgcctccctgtgttgctgttgcagggttgcttctgcctcatactggtttctcccttctggaggtggccaaaagccgggccctgtgcaaccctggtgcataaataccttatggcccctaagtagggcaggtgtgggacacgctctggcacctggggtgtgtgcaagtgctcaggaagacctgcaggcacaggtggcagtgggggtctctggctgtgctcgagcagcagctgcctggggtaagggtagtactctgtgcatgaacaatgctgcagggctcagctctgctcagaccacgaccctggcaccaacagagacctgcctggctctgtggtcatgtaaacctttacaggagctcaagacaaggctgtttattactgctctggcaggaaagaagcactggccatggtcatagagagttccagcaacaggaaagtgagagcccaagctgctgaggtaccagggctcctcaggtgcctgctgcagcagcttggacacagtcgaggaacagcaattgtacctgtgtggtggatcaggctgtgctgcctgtgaacctattctagcacatctgtcacctctgtgccactcacagggataccacccctgagacccctaccccatcagcctctgtgtgggatatggtgttgggcccaagggctctgttgcacagggagatagaggcctggggaggagggaaagcattgaggtggtgttgataccagggatgtgagcccaagcaagagatcagcagagcaaggaggaagaattgcaggtgttggggctggggaaagccccagatggctggagctggtggggccactggagatctcctcctcccatcctgctccatgctggggcagctgctgcaggctgaccagggcctgcccgggcacgttgtgaaggtcaccaaggatggagacttcagagctatctgggacacgtgttttaacgtttgatcagccttgcagcaaaacagtgttttgctctattgaacagtgttcaacaaaaacgatcagtggcctggaacacatctcctacgaagaaaggttgcgagagctgggtctggagaagagaaggctctggggcaacctccctgtggcctgtcagtgcttaaaggaggctcaagagaaagatggagagagactttatacacggagctgtagcaatatgacaaggagaaatggtttaaaatggaaagagggtagatttaggttagctatcaagaagaaattcttcactcagaggtgatgaagcactgtagcaggttgcccagagaagtattggatgcttccttcctggcagggcccaaggccagactggatgggttctgggcagcctgttctggtgggagatgtccctgcctgtggcatggcttggaaatgggtagcctttgaggtccctctcagcccaaatcattctatgttcttgtggttccctgcatttcagcctttgcctgttgactctggtgccactgttggacaattctactcagctgcgtttcatccctgccccaaagcagtaatcccatggataagcaatgctctgaggccttcaccaccctcagggctcctgctgaccctagcggcctccctggcagcatgagccctttgttgtccgcactgctgctgccgagggtcctgccagccccccagggccttttctgcccaggcactgccacctgctaaaacccagcctgcccatggcagggcatcgcatgtctgagggatggaacggggcaagggcagtgctgcaggcagtggttcaagaaacgtttagatgttgtactgagggatgtggtttagtgggaaatactggtgataggtggatggttggactggaggatcttagaggtcttttccaaccttggtgattatgtgattctatgaagggagccatagcctgctcccatcatgccccgccagtccggctctcccgagcactttggttccgcagcat

SEQ ID NO: 22 - DNA, 9897 bp, Artificial Sequence
  Targeting vector
agcgcccaatacgcaaaccgcctctccccgcgcgttggccgattcattaatgcagctggcacgacaggtttcccgactggaaagcgggcagtgagcgcaacgcaattaatgtgagttagctcactcattaggcaccccaggctttacactttatgcttccggctcgtatgttgtgtggaattgtgagcggataacaatttcacacaggaaacagctatgaccatgattacgccaagctcagaattaaccctcactaaagggactagtcctgcaggtttaaacgaattcgcccttgtcgactagatgggagtttaagagtgaattgtggtccatggcatatgcctgtcagcatagggatgctgtaggaattgcaccttggcttgagcccctctcctcctgatgatgcttgcccacagctctgatgtcctgggaaggctcactgcaccttgttgtcagtgaaactgcaataaactatcaagatttgatataattctgcccctctgttctacttgtgagaccacacctggagtactgcatccagttctggtaccactgcatccagttctggtaccaccaacacaaaaaggacatggagctgctggagcagggccagaggagggccatgaagatgaacagagggctgaagcacctcccctatggggacaggctgagagacatggggcttttgagactggagaagagaaggctccatgggacctttcagtgtccttccaatacttgaaagggtccttgaggaaagctggggagggacttcctataaggacatatagcaacaggacaaaaggaaagggttttaaactggaagaaagtagatttagtctagatagtaacaagaaattctttacagtaaggatcacgagacactgaaacaggttgcccaaagcagctgtggatgccccctccctggaagtgttccaggccaggctggatggggctttgagcaacctgttctagtgagaggtgaccctgcctacagcaggggagttgaacctagatggtcttaaatgtcccttccaacccaaatcattctatggcaattctatagagaacacctatgctgagagtagctacaagtatggctggttcctggcagtgcccctgtctctgtgatctatagcagcaccaacagaccctcaaacatcccttcacgattctccggttccaaatccggctccacacacacattaaccatcactggggtccaagccgatgacaaggctgtctattactgtgggagcacagacagcagctatgttggtatcacagtgacatggagcaattaaaaatgatgcataaccttttgcacatctgtaatgctataaggtgagagaaagtaagcaataatagcagagcagcacaatcctaggctacagcaaatgagaacaagcccagatgcagccacggaaataaagaaaaaaaaactgcttacctttagaaagcctcatatagacagggatctccagcaagatacccacacctccactgccaacccttaaatgagggctgggaagggctggatcctggctccacccctttcaatcactcaggtacattgcacacacctgagctcccctggctggccctgccttcccaccaggtgctcaatcactgctttgggctgtgactcagcatctccactacagcatcacagggagcggttgtcggtctctgctgttcctatgtgggtgccccgggacacctgaaggcatgagtggcagtgagggctcccagctctatccatggtgaacagacattatgtttatgctttacagcagcatgaatctggcagtggtgttattgctgtgatgctgctgtctatgctcccacagtaatagatagcctcgtcctcggcttggaccccagtgatggttaatgtgtttgtggagccggatccagaaccggagaatcgtgaagggatgtccgagggtctgttattgccattatagatcacagtgacaggggcactgccaggcatagtcgctgtaacccccggagcaggtgatctcgacggttcctcccaggtttgctgacaccgaggccggctgagtcagcgctgcctgcaccagggaacctggagagggagaggagagaggggagaaaatggatctgagcaattgcctgacacacacagccctccccagactgtgggatgaggccctgtgcccgcagtcacatgtggaatatcaagacacacacatctatgacaatcacaatctgattatcaaccactatggctggtaccagcagaaggcacctagcagtgcccctgtcactctgatctactatgatgatgagagaccctcgaacatcccttcacgattctccggttccaaatccggctccacacacacattaaccatcactggggtccaagccgacgacgaggctgtctattactgtgggaatgaagacagcagcggtactggtgccccagtgacacagagcaatggagatatgatacacagacctgacatctcagggagcagctggtcattatcctggtgacacaagtcccaggcatggcccagcactgtgctgcaggtggctatgccgggtgccctgctctgccctcctgtagagcctcaggactgtgcccatcactcagggaggagatggtcccagcagccctgtccctgccctgcactgcacttagctcctggaccccatcaatttctgagaactgtcattctcggaatacctcgatcgataacttcgtataatgtatactatacgaagttattttatttgtgaaatttgtgatgctattgctttatttgtaaccattataagctgcaataaacaagttggggtgggcgaagaactccagcatgagatccccgcgctggaggatcatccagccggcgtcccggaaaacgattccgaagcccaacctttcatagaaggcggcggtggaatcgaaatctcgtgatggcaggttgggcgtcgcttggtcggtcatttcgaaccccagagtcccgctcagaagaactcgtcaagaaggcgatagaaggcgatgcgctgcgaatcgggagcggcgataccgtaaagcacgaggaagcggtcagcccattcgccgccaagctcttcagcaatatcacgggtagccaacgctatgtcctgatagcggtccgccacacccagccggccacagtcgatgaatccagaaaagcggccattttccaccatgatattcggcaagcaggcatcgccatgggtcacgacgagatcctcgccgtcgggcatgcgcgccttgagcctggcgaacagttcggctggcgcgagcccctgatgctcttcgtccagatcatcctgatcgacaagaccggcttccatccgagtacgtgctcgctcgatgcgatgtttcgcttggtggtcgaatgggcaggtagccggatcaagcgtatgcagccgccgcattgcatcagccatgatggatactttctcggcaggagcaaggtgagatgacaggagatcctgccccggcacttcgcccaatagcagccagtcccttcccgcttcagtgacaacgtcgagcacagctgcgcaaggaacgcccgtcgtggccagccacgatagccgcgctgcctcgtcctgcagttcattcagggcaccggacaggtcggtcttgacaaaaagaaccgggcgcccctgcgctgacagccggaacacggcggcatcagagcagccgattgtctgttgtgcccagtcatagccgaatagcctctccacccaagcggccggagaacctgcgtgcaatccatcttgttcaatcatgcgaaacgatcctcatcctgtctcttgatcagatccgaaaatggatatacaagctcccgggagctttttgcaaaagcctaggcctccaaaaaagcctcctcactacttctggaatagctcagaggcagaggcggcctcggcctctgcataaataaaaaaaattagtcagccatggggcggagaatgggcggaactgggcggagttaggggcgggatgggcggagttaggggcgggactatggttgctgactaattgagatgcatgctttgcatacttctgcctgctggggagcctggggactttccacacctggttgctgactaattgagatgcatgctttgcatacttctgcctgctggggagcctggggactttccacaccctaaataacttcgtataatgtatactatacgaagttatctcgtgtccgataactgtaattatcggaccgtcaatcgattcgcgaggcgcgccatattgcctccctgtgttgctgttgcagggttgcttctgcctcatactggtttctcccttctggaggtggccaaaagccgggccctgtgcaaccctggtgcataaataccttatggcccctaagtagggcaggtgtgggacacgctctggcacctggggtgtgtgcaagtgctcaggaagacctgcaggcacaggtggcagtgggggtctctggctgtgctcgagcagcagctgcctggggtaagggtagtactctgtgcatgaacaatgctgcagggctcagctctgctcagaccacgaccctggcaccaacagagacctgcctggctctgtggtcatgtaaacctttacaggagctcaagacaaggctgtttattactgctctggcaggaaagaagcactggccatggtcatagagagttccagcaacaggaaagtgagagcccaagctgctgaggtaccagggctcctcaggtgcctgctgcagcagcttggacacagtcgaggaacagcaattgtacctgtgtggtggatcaggctgtgctgcctgtgaacctattctagcacatctgtcacctctgtgccactcacagggataccacccctgagacccctaccccatcagcctctgtgtgggatatggtgttgggcccaagggctctgttgcacagggagatagaggcctggggaggagggaaagcattgaggtggtgttgataccagggatgtgagcccaagcaagagatcagcagagcaaggaggaagaattgcaggtgttggggctggggaaagccccagatggctggagctggtggggccactggagatctcctcctcccatcctgctccatgctggggcagctgctgcaggctgaccagggcctgcccgggcacgttgtgaaggtcaccaaggatggagacttcagagctatctgggacacgtgttttaacgtttgatcagccttgcagcaaaacagtgttttgctctattgaacagtgttcaacaaaaacgatcagtggcctggaacacatctcctacgaagaaaggttgcgagagctgggtctggagaagagaaggctctggggcaacctccctgtggcctgtcagtgcttaaaggaggctcaagagaaagatggagagagactttatacacggagctgtagcaatatgacaaggagaaatggtttaaaatggaaagagggtagatttaggttagctatcaagaagaaattcttcactcagaggtgatgaagcactgtagcaggttgcccagagaagtattggatgcttccttcctggcagggcccaaggccagactggatgggttctgggcagcctgttctggtgggagatgtccctgcctgtggcatggcttggaaatgggtagcctttgaggtccctctcagcccaaatcattctatgttcttgtggttccctgcatttcagcctttgcctgttgactctggtgccactgttggacaattctactcagctgcgtttcatccctgccccaaagcagtaatcccatggataagcaatgctctgaggccttcaccaccctcagggctcctgctgaccctagcggcctccctggcagcatgagccctttgttgtccgcactgctgctgccgagggtcctgccagccccccagggccttttctgcccaggcactgccacctgctaaaacccagcctgcccatggcagggcatcgcatgtctgagggatggaacggggcaagggcagtgctgcaggcagtggttcaagaaacgtttagatgttgtactgagggatgtggtttagtgggaaatactggtgataggtggatggttggactggaggatcttagaggtcttttccaaccttggtgattatgtgattctatgaagggagccatagcctgctcccatcatgccccgccagtccggctctcccgagcactttggttccgcagcatgcggccgcaagggcgaattcgcggccgctaaattcaattcgccctatagtgagtcgtattacaattcactggccgtcgttttacaacgtcgtgactgggaaaaccctggcgttacccaacttaatcgccttgcagcacatccccctttcgccagctggcgtaatagcgaagaggcccgcaccgatcgcccttcccaacagttgcgcagcctatacgtacggcagtttaaggtttacacctataaaagagagagccgttatcgtctgtttgtggatgtacagagtgatattattgacacgccggggcgacggatggtgatccccctggccagtgcacgtctgctgtcagataaagtctcccgtgaactttacccggtggtgcatatcggggatgaaagctggcgcatgatgaccaccgatatggccagtgtgccggtctccgttatcggggaagaagtggctgatctcagccaccgcgaaaatgacatcaaaaacgccattaacctgatgttctggggaatataaatgtcaggcatgagattatcaaaaaggatcttcacctagatccttttcacgtagaaagccagtccgcagaaacggtgctgaccccggatgaatgtcagctactgggctatctggacaagggaaaacgcaagcgcaaagagaaagcaggtagcttgcagtgggcttacatggcgatagctagactgggcggttttatggacagcaagcgaaccggaattgccagctggggcgccctctggtaaggttgggaagccctgcaaagtaaactggatggctttcttgccgccaaggatctgatggcgcaggggatcaagctctgatcaagagacaggatgaggatcgtttcgcatgattgaacaagatggattgcacgcaggttctccggccgcttgggtggagaggctattcggctatgactgggcacaacagacaatcggctgctctgatgccgccgtgttccggctgtcagcgcaggggcgcccggttctttttgtcaagaccgacctgtccggtgccctgaatgaactgcaagacgaggcagcgcggctatcgtggctggccacgacgggcgttccttgcgcagctgtgctcgacgttgtcactgaagcgggaagggactggctgctattgggcgaagtgccggggcaggatctcctgtcatctcaccttgctcctgccgagaaagtatccatcatggctgatgcaatgcggcggctgcatacgcttgatccggctacctgcccattcgaccaccaagcgaaacatcgcatcgagcgagcacgtactcggatggaagccggtcttgtcgatcaggatgatctggacgaagagcatcaggggctcgcgccagccgaactgttcgccaggctcaaggcgagcatgcccgacggcgaggatctcgtcgtgacccatggcgatgcctgcttgccgaatatcatggtggaaaatggccgcttttctggattcatcgactgtggccggctgggtgtggcggaccgctatcaggacatagcgttggctacccgtgatattgctgaagagcttggcggcgaatgggctgaccgcttcctcgtgctttacggtatcgccgctcccgattcgcagcgcatcgccttctatcgccttcttgacgagttcttctgaattattaacgcttacaatttcctgatgcggtattttctccttacgcatctgtgcggtatttcacaccgcatcaggtggcacttttcggggaaatgtgcgcggaacccctatttgtttatttttctaaatacattcaaatatgtatccgctcatgagattatcaaaaaggatcttcacctagatccttttaaattaaaaatgaagttttaaatcaatctaaagtatatatgagtaaacttggtctgacagttaccaatgcttaatcagtgaggcacctatctcagcgatctgtctatttcgttcatccatagttgcctgactccccgtcgtgtagataactacgatacgggagggcttaccatctggccccagtgctgcaatgataccgcgagacccacgctcaccggctccagatttatcagcaataaaccagccagccggaagggccgagcgcagaagtggtcctgcaactttatccgcctccatccagtctattaattgttgccgggaagctagagtaagtagttcgccagttaatagtttgcgcaacgttgttgccattgctacaggcatcgtggtgtcacgctcgtcgtttggtatggcttcattcagctccggttcccaacgatcaaggcgagttacatgatcccccatgttgtgcaaaaaagcggttagctccttcggtcctccgatcgttgtcagaagtaagttggccgcagtgttatcactcatggttatggcagcactgcataattctcttactgtcatgccatccgtaagatgcttttctgtgactggtgagtactcaaccaagtcattctgagaatagtgtatgcggcgaccgagttgctcttgcccggcgtcaatacgggataataccgcgccacatagcagaactttaaaagtgctcatcattggaaaacgttcttcggggcgaaaactctcaaggatcttaccgctgttgagatccagttcgatgtaacccactcgtgcacccaactgatcttcagcatcttttactttcaccagcgtttctgggtgagcaaaaacaggaaggcaaaatgccgcaaaaaagggaataagggcgacacggaaatgttgaatactcatactcttcctttttcaatattattgaagcatttatcagggttattgtctcatgaccaaaatcccttaacgtgagttttcgttccactgagcgtcagaccccgtagaaaagatcaaaggatcttcttgagatcctttttttctgcgcgtaatctgctgcttgcaaacaaaaaaaccaccgctaccagcggtggtttgtttgccggatcaagagctaccaactctttttccgaaggtaactggcttcagcagagcgcagataccaaatactgttcttctagtgtagccgtagttaggccaccacttcaagaactctgtagcaccgcctacatacctcgctctgctaatcctgttaccagtggctgctgccagtggcgataagtcgtgtcttaccgggttggactcaagacgatagttaccggataaggcgcagcggtcgggctgaacggggggttcgtgcacacagcccagcttggagcgaacgacctacaccgaactgagatacctacagcgtgagctatgagaaagcgccacgcttcccgaagggagaaaggcggacaggtatccggtaagcggcagggtcggaacaggagagcgcacgagggagcttccagggggaaacgcctggtatctttatagtcctgtcgggtttcgccacctctgacttgagcgtcgatttttgtgatgctcgtcaggggggcggagcctatggaaaaacgccagcaacgcggcctttttacggttcctggccttttgctggccttttgctcacatgttctttcctgcgttatcccctgattctgtggataaccgtattaccgcctttgagtgagctgataccgctcgccgcagccgaacgaccgagcgcagcgagtcagtgagcgaggaagcggaag

SEQ ID NO: 23 - DNA, 10664 bp, Artificial Sequence
  Targeting vector
agcgcccaatacgcaaaccgcctctccccgcgcgttggccgattcattaatgcagctggcacgacaggtttcccgactggaaagcgggcagtgagcgcaacgcaattaatgtgagttagctcactcattaggcaccccaggctttacactttatgcttccggctcgtatgttgtgtggaattgtgagcggataacaatttcacacaggaaacagctatgaccatgattacgccaagctcagaattaaccctcactaaagggactagtcctgcaggtttaaacgaattcgcccttgtcgactagatgggagtttaagagtgaattgtggtccatggcatatgcctgtcagcatagggatgctgtaggaattgcaccttggcttgagcccctctcctcctgatgatgcttgcccacagctctgatgtcctgggaaggctcactgcaccttgttgtcagtgaaactgcaataaactatcaagatttgatataattctgcccctctgttctacttgtgagaccacacctggagtactgcatccagttctggtaccactgcatccagttctggtaccaccaacacaaaaaggacatggagctgctggagcagggccagaggagggccatgaagatgaacagagggctgaagcacctcccctatggggacaggctgagagacatggggcttttgagactggagaagagaaggctccatgggacctttcagtgtccttccaatacttgaaagggtccttgaggaaagctggggagggacttcctataaggacatatagcaacaggacaaaaggaaagggttttaaactggaagaaagtagatttagtctagatagtaacaagaaattctttacagtaaggatcacgagacactgaaacaggttgcccaaagcagctgtggatgccccctccctggaagtgttccaggccaggctggatggggctttgagcaacctgttctagtgagaggtgaccctgcctacagcaggggagttgaacctagatggtcttaaatgtcccttccaacccaaatcattctatggcaattctatagagaacacctatgctgagagtagctacaagtatggctggttcctggcagtgcccctgtctctgtgatctatagcagcaccaacagaccctcaaacatcccttcacgattctccggttccaaatccggctccacacacacattaaccatcactggggtccaagccgatgacaaggctgtctattactgtgggagcacagacagcagctatgttggtatcacagtgacatggagcaattaaaaatgatgcataaccttttgcacatctgtaatgctataaggtgagagaaagtaagcaataatagcagagcagcacaatcctaggctacagcaaatgagaacaagcccagatgcagccacggaaataaagaaaaaaaaactgcttacctttagaaagcctcatatagacagggatctccagcaagatacccacacctccactgccaacccttaaatgagggctgggaagggctggatcctggctccacccctttcaatcactcaggtacattgcacacacctgagctcccctggctggccctgccttcccaccaggtgctcaatcactgctttgggctgtgactcagcatctccactacagcatcacagggagcggttgtcggtctctgctgttcctatgtgggtgccccgggacacctgaaggcatgagtggcagtgagggctcccagctctatccatggtgaacagacattatgtttatgctttacagcagcatgaatctggcagtggtgttattgctgtgatgctgctgtctatgctcccacagtaatagatagcctcgtcctcggcttggaccccagtgatggttaatgtgtttgtggagccggatccagaaccggagaatcgtgaagggatgtccgagggtctgttattgccattatagatcacagtgacaggggcactgccaggcatagtcgctgtaacccccggagcaggtgatctcgacggttcctcccaggtttgctgacaccgaggccggctgagtcagcgctgcctgcaccagggaacctggagagggagaggagagaggggagaaaatggatctgagcaattgcctgacacacacagccctccccagactgtgggatgaggccctgtgcccgcagtcacatgtggaatatcaagacacacacatctatgacaatcacaatctgattatcaaccactatggctggtaccagcagaaggcacctagcagtgcccctgtcactctgatctactatgatgatgagagaccctcgaacatcccttcacgattctccggttccaaatccggctccacacacacattaaccatcactggggtccaagccgacgacgaggctgtctattactgtgggaatgaagacagcagcggtactggtgccccagtgacacagagcaatggagatatgatacacagacctgacatctcagggagcagctggtcattatcctggtgacacaagtcccaggcatggcccagcactgtgctgcaggtggctatgccgggtgccctgctctgccctcctgtagagcctcaggactgtgcccatcactcagggaggagatggtcccagcagccctgtccctgccctgcactgcacttagctcctggaccccatcaatttctgagaactgtcattctcggaatacctcgatcgataacttcgtataatgtatactatacgaagttattttatttgtgaaatttgtgatgctattgctttatttgtaaccattataagctgcaataaacaagttggggtgggcgaagaactccagcatgagatccccgcgctggaggatcatccagccggcgtcccggaaaacgattccgaagcccaacctttcatagaaggcggcggtggaatcgaaatctcgtgatggcaggttgggcgtcgcttggtcggtcatttcgaaccccagagtcccgctcagaagaactcgtcaagaaggcgatagaaggcgatgcgctgcgaatcgggagcggcgataccgtaaagcacgaggaagcggtcagcccattcgccgccaagctcttcagcaatatcacgggtagccaacgctatgtcctgatagcggtccgccacacccagccggccacagtcgatgaatccagaaaagcggccattttccaccatgatattcggcaagcaggcatcgccatgggtcacgacgagatcctcgccgtcgggcatgcgcgccttgagcctggcgaacagttcggctggcgcgagcccctgatgctcttcgtccagatcatcctgatcgacaagaccggcttccatccgagtacgtgctcgctcgatgcgatgtttcgcttggtggtcgaatgggcaggtagccggatcaagcgtatgcagccgccgcattgcatcagccatgatggatactttctcggcaggagcaaggtgagatgacaggagatcctgccccggcacttcgcccaatagcagccagtcccttcccgcttcagtgacaacgtcgagcacagctgcgcaaggaacgcccgtcgtggccagccacgatagccgcgctgcctcgtcctgcagttcattcagggcaccggacaggtcggtcttgacaaaaagaaccgggcgcccctgcgctgacagccggaacacggcggcatcagagcagccgattgtctgttgtgcccagtcatagccgaatagcctctccacccaagcggccggagaacctgcgtgcaatccatcttgttcaatcatgcgaaacgatcctcatcctgtctcttgatcagatccgaaaatggatatacaagctcccgggagctttttgcaaaagcctaggcctccaaaaaagcctcctcactacttctggaatagctcagaggcagaggcggcctcggcctctgcataaataaaaaaaattagtcagccatggggcggagaatgggcggaactgggcggagttaggggcgggatgggcggagttaggggcgggactatggttgctgactaattgagatgcatgctttgcatacttctgcctgctggggagcctggggactttccacacctggttgctgactaattgagatgcatgctttgcatacttctgcctgctggggagcctggggactttccacaccctaaataacttcgtataatgtatactatacgaagttatctcgtgtccgataactgtaattatcggaccgtcaatcgattcgcgacagtctgccctgactcagcctgcctccgtgtctgggtctcctggacagtcgatcaccatctcctgcactggaaccagctcaagtgacgttggtggttataactatgtctcctggtaccaacaaaacccaggcaaagcccccaaactcatgatttatgatgtcagttcaaatcggccctcagggatttctaatcgcttctctggctccaagtctggcaacacggcctccctgaccatctctgggctccaggctgacgacgaggctgattattactgcacctcatatacaaacgacggtagcaattctcaggtattcggcggagggaccaagctgaccgtcctaggtgcctgacacacacagccctccccagactgtgggatgaggccctgtgcccgcagtcacatgtggaatatcaagacacacacatctatgacaatcaccagtctgccctgactcagcctgcctccgtgtctgggtctcctggacagtcgatcaccatctcctgcactggaaccagcagtgacgttggttataactatgtctcctggtaccaacaaaacccaggcaaagcccccaaactcatgatttatgatggtaatcggccctcagggatttctaatcgcttctctggctccaagtctggcaacacggcctccctgaccatctctgggctccaggctgacgacgaggctgattattactgcacctcatatacaaacgacagctctcaggtattcggcggagggaccaagctgaccgtcctaggtggcgcgccatattgcctccctgtgttgctgttgcagggttgcttctgcctcatactggtttctcccttctggaggtggccaaaagccgggccctgtgcaaccctggtgcataaataccttatggcccctaagtagggcaggtgtgggacacgctctggcacctggggtgtgtgcaagtgctcaggaagacctgcaggcacaggtggcagtgggggtctctggctgtgctcgagcagcagctgcctggggtaagggtagtactctgtgcatgaacaatgctgcagggctcagctctgctcagaccacgaccctggcaccaacagagacctgcctggctctgtggtcatgtaaacctttacaggagctcaagacaaggctgtttattactgctctggcaggaaagaagcactggccatggtcatagagagttccagcaacaggaaagtgagagcccaagctgctgaggtaccagggctcctcaggtgcctgctgcagcagcttggacacagtcgaggaacagcaattgtacctgtgtggtggatcaggctgtgctgcctgtgaacctattctagcacatctgtcacctctgtgccactcacagggataccacccctgagacccctaccccatcagcctctgtgtgggatatggtgttgggcccaagggctctgttgcacagggagatagaggcctggggaggagggaaagcattgaggtggtgttgataccagggatgtgagcccaagcaagagatcagcagagcaaggaggaagaattgcaggtgttggggctggggaaagccccagatggctggagctggtggggccactggagatctcctcctcccatcctgctccatgctggggcagctgctgcaggctgaccagggcctgcccgggcacgttgtgaaggtcaccaaggatggagacttcagagctatctgggacacgtgttttaacgtttgatcagccttgcagcaaaacagtgttttgctctattgaacagtgttcaacaaaaacgatcagtggcctggaacacatctcctacgaagaaaggttgcgagagctgggtctggagaagagaaggctctggggcaacctccctgtggcctgtcagtgcttaaaggaggctcaagagaaagatggagagagactttatacacggagctgtagcaatatgacaaggagaaatggtttaaaatggaaagagggtagatttaggttagctatcaagaagaaattcttcactcagaggtgatgaagcactgtagcaggttgcccagagaagtattggatgcttccttcctggcagggcccaaggccagactggatgggttctgggcagcctgttctggtgggagatgtccctgcctgtggcatggcttggaaatgggtagcctttgaggtccctctcagcccaaatcattctatgttcttgtggttccctgcatttcagcctttgcctgttgactctggtgccactgttggacaattctactcagctgcgtttcatccctgccccaaagcagtaatcccatggataagcaatgctctgaggccttcaccaccctcagggctcctgctgaccctagcggcctccctggcagcatgagccctttgttgtccgcactgctgctgccgagggtcctgccagccccccagggccttttctgcccaggcactgccacctgctaaaacccagcctgcccatggcagggcatcgcatgtctgagggatggaacggggcaagggcagtgctgcaggcagtggttcaagaaacgtttagatgttgtactgagggatgtggtttagtgggaaatactggtgataggtggatggttggactggaggatcttagaggtcttttccaaccttggtgattatgtgattctatgaagggagccatagcctgctcccatcatgccccgccagtccggctctcccgagcactttggttccgcagcatgcggccgcaagggcgaattcgcggccgctaaattcaattcgccctatagtgagtcgtattacaattcactggccgtcgttttacaacgtcgtgactgggaaaaccctggcgttacccaacttaatcgccttgcagcacatccccctttcgccagctggcgtaatagcgaagaggcccgcaccgatcgcccttcccaacagttgcgcagcctatacgtacggcagtttaaggtttacacctataaaagagagagccgttatcgtctgtttgtggatgtacagagtgatattattgacacgccggggcgacggatggtgatccccctggccagtgcacgtctgctgtcagataaagtctcccgtgaactttacccggtggtgcatatcggggatgaaagctggcgcatgatgaccaccgatatggccagtgtgccggtctccgttatcggggaagaagtggctgatctcagccaccgcgaaaatgacatcaaaaacgccattaacctgatgttctggggaatataaatgtcaggcatgagattatcaaaaaggatcttcacctagatccttttcacgtagaaagccagtccgcagaaacggtgctgaccccggatgaatgtcagctactgggctatctggacaagggaaaacgcaagcgcaaagagaaagcaggtagcttgcagtgggcttacatggcgatagctagactgggcggttttatggacagcaagcgaaccggaattgccagctggggcgccctctggtaaggttgggaagccctgcaaagtaaactggatggctttcttgccgccaaggatctgatggcgcaggggatcaagctctgatcaagagacaggatgaggatcgtttcgcatgattgaacaagatggattgcacgcaggttctccggccgcttgggtggagaggctattcggctatgactgggcacaacagacaatcggctgctctgatgccgccgtgttccggctgtcagcgcaggggcgcccggttctttttgtcaagaccgacctgtccggtgccctgaatgaactgcaagacgaggcagcgcggctatcgtggctggccacgacgggcgttccttgcgcagctgtgctcgacgttgtcactgaagcgggaagggactggctgctattgggcgaagtgccggggcaggatctcctgtcatctcaccttgctcctgccgagaaagtatccatcatggctgatgcaatgcggcggctgcatacgcttgatccggctacctgcccattcgaccaccaagcgaaacatcgcatcgagcgagcacgtactcggatggaagccggtcttgtcgatcaggatgatctggacgaagagcatcaggggctcgcgccagccgaactgttcgccaggctcaaggcgagcatgcccgacggcgaggatctcgtcgtgacccatggcgatgcctgcttgccgaatatcatggtggaaaatggccgcttttctggattcatcgactgtggccggctgggtgtggcggaccgctatcaggacatagcgttggctacccgtgatattgctgaagagcttggcggcgaatgggctgaccgcttcctcgtgctttacggtatcgccgctcccgattcgcagcgcatcgccttctatcgccttcttgacgagttcttctgaattattaacgcttacaatttcctgatgcggtattttctccttacgcatctgtgcggtatttcacaccgcatcaggtggcacttttcggggaaatgtgcgcggaacccctatttgtttatttttctaaatacattcaaatatgtatccgctcatgagattatcaaaaaggatcttcacctagatccttttaaattaaaaatgaagttttaaatcaatctaaagtatatatgagtaaacttggtctgacagttaccaatgcttaatcagtgaggcacctatctcagcgatctgtctatttcgttcatccatagttgcctgactccccgtcgtgtagataactacgatacgggagggcttaccatctggccccagtgctgcaatgataccgcgagacccacgctcaccggctccagatttatcagcaataaaccagccagccggaagggccgagcgcagaagtggtcctgcaactttatccgcctccatccagtctattaattgttgccgggaagctagagtaagtagttcgccagttaatagtttgcgcaacgttgttgccattgctacaggcatcgtggtgtcacgctcgtcgtttggtatggcttcattcagctccggttcccaacgatcaaggcgagttacatgatcccccatgttgtgcaaaaaagcggttagctccttcggtcctccgatcgttgtcagaagtaagttggccgcagtgttatcactcatggttatggcagcactgcataattctcttactgtcatgccatccgtaagatgcttttctgtgactggtgagtactcaaccaagtcattctgagaatagtgtatgcggcgaccgagttgctcttgcccggcgtcaatacgggataataccgcgccacatagcagaactttaaaagtgctcatcattggaaaacgttcttcggggcgaaaactctcaaggatcttaccgctgttgagatccagttcgatgtaacccactcgtgcacccaactgatcttcagcatcttttactttcaccagcgtttctgggtgagcaaaaacaggaaggcaaaatgccgcaaaaaagggaataagggcgacacggaaatgttgaatactcatactcttcctttttcaatattattgaagcatttatcagggttattgtctcatgaccaaaatcccttaacgtgagttttcgttccactgagcgtcagaccccgtagaaaagatcaaaggatcttcttgagatcctttttttctgcgcgtaatctgctgcttgcaaacaaaaaaaccaccgctaccagcggtggtttgtttgccggatcaagagctaccaactctttttccgaaggtaactggcttcagcagagcgcagataccaaatactgttcttctagtgtagccgtagttaggccaccacttcaagaactctgtagcaccgcctacatacctcgctctgctaatcctgttaccagtggctgctgccagtggcgataagtcgtgtcttaccgggttggactcaagacgatagttaccggataaggcgcagcggtcgggctgaacggggggttcgtgcacacagcccagcttggagcgaacgacctacaccgaactgagatacctacagcgtgagctatgagaaagcgccacgcttcccgaagggagaaaggcggacaggtatccggtaagcggcagggtcggaacaggagagcgcacgagggagcttccagggggaaacgcctggtatctttatagtcctgtcgggtttcgccacctctgacttgagcgtcgatttttgtgatgctcgtcaggggggcggagcctatggaaaaacgccagcaacgcggcctttttacggttcctggccttttgctggccttttgctcacatgttctttcctgcgttatcccctgattctgtggataaccgtattaccgcctttgagtgagctgataccgctcgccgcagccgaacgaccgagcgcagcgagtcagtgagcgaggaagcggaag

SEQ ID NO: 24 - DNA, 24 bp, Artificial Sequence
  Synthetic Primer
cgctttgtacgaacgttgtcacgt

SEQ ID NO: 25 - DNA, 25 bp, Artificial Sequence
  Synthetic Primer
tacctgaaggtctctttgtgttttg

SEQ ID NO: 26 - DNA, 2794 bp, Gallus gallus
gggtatcacgtggggcaaatcgagagctaccattggctatggggaggagaaaatgaggcgtgctacttcctcgttcctgcagtgcgtgtcgaggtgccgtgttggtcggatctcagtggcagagcaggatggtgagcggtggccttggggccgctccctcactctgctgggctggtgcggtggctccgggaccggactttcagtggtgtttggtgtggtgctcactgtcctttggtgtcactgtgtggtgaattccctcagctgggcggtgagagcccatgctgtgtcctggtaggagtagtctgggctgcagtgcgggctctttgtgcgtgttgggggcggttccctggaagctaattctggaagaaatcccggctgcctctgtaacagttgttggcgatgtcaaacaccctggagctgctgactggctctgtaccattgagtgatgcagtttaaacctctctctttcctcctgctgtgtgtgaagctggtgttagtgctaggagacctgcacatccctcaccgatgcagtggtttaccagcaaagttcaagagcctcctggttccagggaagattcagcatattttgtgtacaggaaacctctgcaccaaggagagctatgactacctcaggactttggctggagatgttcacgttgttaagggggactctgaggtaatgttcttgctgctgtgaattcctcagtcctccatcttacaagccgtagttgtcccactgaaagctgggaaacccttcggtgtttgcaattcctgagcgctaatgtgtgggggaaggatgtaggaacaaataaggctcaagagacaacaacttcctaggctcctcttattgcccttgtggtaagggaggacttggtgtgtagtggtaatacatgcactcaacttattaagttctcatagctgctgtgaagctgctgcagtccctcagatccctgcaggaagaggggactgactgactgttgaatagccttgaagctcctgctctgcatgtggttccggtcaggctcaagatcccagttcttagctcttcagttgctcttctgggggtatagtactagcatctgggtcactgcagatggacagagactgtgcttgggtagcaaaaggcagacttacgttgtgaaaccttcattgtgttggtgaggttctttgatttctaccttgtgtatctctcttcctcagagtctgaattatcctgaacagaaggttgtaactgttgggcagttcagaattgggttgattcatggccatcaagtcattccctggggtgatgtggcaagcttggcattgctgcagaggcagctggatgtagacattcttatctcaggacatacacacagatttgaagcatttgagcatgaaaataagttctacatcaacccaggatcagctacaggagcctacactggtttacaaacgtgagtacaatgagccttgtgtttgtctttaagacagatgtctgtccttaagagtgcagcccatgtgttgaagagcactggtgagatgcagtgccatgcaggccatctctccctttcccagagaacacggcctacctctctctgttcataaggtcttggttaacttatgagttggccagcacagcctggcactgatgtgtcatgatcataaccctgagcccacgctctgctatgctgttgcttcttagagttgcattgccttgaggtgtattccagaagctgtgtgctgagctcttgttgggaaagaggccctcagggcactgccaacatctgaggcttgcaggagctggaacattcagccctgagggctgctctggccaactgcagctctgagtctgcagtcagtgcctctgagctgtgatgcttctcagataactgcagccctttgcaatgtaatgttttataatatatttccataggacatcttggtaagaggtgtaagctaatcagggtgattgacaaagtatgttttctttccaggaacgtcattccttcatttgtactgatggatatccaggcttccacagttgtgacttatgtataccagctaattgaggacgatgtgaaagtagaaagaattgagttcaagaaatactgacacgtgtttgaatctgcctgctgacttctcactgcctctcattctttctctcctagttaaagctgaatccggccacgtgggggtgctgctgcagcggcgtgtaactgtgagcttgggaagttctcaactagggcttagagcaggagaaactgattaacagaaattgccttattaaatgtatatatttcctgtgtctaagaacgaggtgctgttgttcctgacttgcggagctgcagctagtggtagcttggaatttaacctctcctgtaaaatgagcatagaataaaacagtattttcacatttctggatcctgttaattgtttgttaattaagaggacaggaattcagtgtcagggggctgctctttgcttcccaatgtgtaccactgaagcctctctggatttatcagagatactcaatggactcttaacagcactgtggcacctgacctcctgctgccttcagcctcccttcctggctggtgtgcttatgttgaggagctgtgggaggctggtgcagttctgtgggatgaggtaaggccagctgaatagcctgggggctggtcagggggcttagtgagaggagcagggctggggaatgttgtgaacagcaggtggtgccactgctattctgaggaaggaggcagcttctgcaaatgctttgcaatgcaggatgacaaagtgcttctgctagccctag

SEQ ID NO: 27 - DNA, 10304 bp, Artificial Sequence
  Targeting vector
agcgcccaatacgcaaaccgcctctccccgcgcgttggccgattcattaatgcagctggcacgacaggtttcccgactggaaagcgggcagtgagcgcaacgcaattaatgtgagttagctcactcattaggcaccccaggctttacactttatgcttccggctcgtatgttgtgtggaattgtgagcggataacaatttcacacaggaaacagctatgaccatgattacgccaagctcagaattaaccctcactaaagggactagtcctgcaggtttaaacgaattcgcccttgtcgacgggtatcacgtggggcaaatcgagagctaccattggctatggggaggagaaaatgaggcgtgctacttcctcgttcctgcagtgcgtgtcgaggtgccgtgttggtcggatctcagtggcagagcaggatggtgagcggtggccttggggccgctccctcactctgctgggctggtgcggtggctccgggaccggactttcagtggtgtttggtgtggtgctcactgtcctttggtgtcactgtgtggtgaattccctcagctgggcggtgagagcccatgctgtgtcctggtaggagtagtctgggctgcagtgcgggctctttgtgcgtgttgggggcggttccctggaagctaattctggaagaaatcccggctgcctctgtaacagttgttggcgatgtcaaacaccctggagctgctgactggctctgtaccattgagtgatgcagtttaaacctctctctttcctcctgctgtgtgtgaagctggtgttagtgctaggagacctgcacatccctcaccgatgcagtggtttaccagcaaagttcaagagcctcctggttccagggaagattcagcatattttgtgtacaggaaacctctgcaccaaggagagctatgactacctcaggactttggctggagatgttcacgttgttaagggggactctgaggtaatgttcttgctgctgtgaattcctcagtcctccatcttacaagccgtagttgtcccactgaaagctgggaaacccttcggtgtttgcaattcctgagcgctaatgtgtgggggaaggatgtaggaacaaataaggctcaagagacaacaacttcctaggctcctcttattgcccttgtggtaagggaggacttggtgtgtagtggtaatacatgcactcaacttattaagttctcatagctgctgtgaagctgctgcagtccctcagatccctgcaggaagaggggactgactgactgttgaatagccttgaagctcctgctctgcatgtggttccggtcaggctcaagatcccagttcttagctcttcagttgctcttctgggggtatagtactagcatctgggtcactgcagatggacagagactgtgcttgggtagcaaaaggcagacttacgttgtgaaaccttcattgtgttggtgaggttctttgatttctaccttgtgtatctctcttcctcagagtctgaattatcctgaacagaaggttgtaactgttgggcagttcagaattgggttgattcatggccatcaagtcattccctggggtgatgtggcaagcttggcattgctgcagaggcagctggatgtagacattcttatctcaggacatacacacagatttgaagcatttgagcatgaaaataagttctacatcaacccaggatcagctacaggagcctacactggtttacaaacgtgagtacaatgagccttgtgtttgtctttaagacagatgtctgtccttaagagtgcagcccatgtgttgaagagcactggtgagatgcagtgccatgcaggccatctctccctttcccagagaacacggcctacctctctctgttcataaggtcttggttaacttatgagttggccagcacagcctggcactgatgtgtcatgatcataaccctgagcccacgctctgctatgctgttgcttcttagagttgcattgccttgaggtgtattccagaagctgtgtgctgagctcttgttgggaaagaggccctcagggcactgccaacatctgaggcttgcaggagctggaacattcagccctgagggctgctctggccaactgcagctctgagtctgcagtcagtgcctctgagctgtgatgcttctcagataactgcagccctttgcaatgtaatgttttataatatatttccataggacatcttggtaagaggtgtaagctaatcagggtgattgacaaagtatgttttctttccaggaacgtcattccttcatttgtactgatggatatccaggcttccacagttgtgacttatgtataccagctaattgaggacgatgtgaaagtagaaagaattgagttcaagaaatactgacacgtgtttgaatctgcctgctgacttctcactgcctctcattctttctctcctagttaaagctgaatccggccacgtgggggtgctgctgcagcggcgtgtaactgtgagcttgggaagttctcaactagggcttagagcaggagaaactgattaacagaaattgccttattaaatgtatatatttcctgtgtctaagaacgaggtgctgttgttcctgacttgcggagctgcagctagtggtagcttggaatttaacctctcctgtaaaatgagcatagaataaaacagtattttcacatttctggatcctgttaattgtttgttaattaagaggacaggaattcagtgtcagggggctgctctttgcttcccaatgtgtaccactgaagcctctctggatttatcagagatactcaatggactcttaacagcactgtggcacctgacctcctgctgccttcagcctcccttcctggctggtgtgcttatgttgaggagctgtgggaggctggtgcagttctgtgggatgaggtaaggccagctgaatagcctgggggctggtcagggggcttagtgagaggagcagggctggggaatgttgtgaacagcaggtggtgccactgctattctgaggaaggaggcagcttctgcaaatgctttgcaatgcaggatgacaaagtgcttctgctagccctagtcaatttctgagaactgtcattctcggaatacctcgatcgataacttcgtataatgtatactatacgaagttattttatttgtgaaatttgtgatgctattgctttatttgtaaccattataagctgcaataaacaagttggggtgggcgaagaactccagcatgagatccccgcgctggaggatcatccagccggcgtcccggaaaacgattccgaagcccaacctttcatagaaggcggcggtggaatcgaaatctcgtgatggcaggttgggcgtcgcttggtcggtcatttcgaaccccagagtcccgctcagaagaactcgtcaagaaggcgatagaaggcgatgcgctgcgaatcgggagcggcgataccgtaaagcacgaggaagcggtcagcccattcgccgccaagctcttcagcaatatcacgggtagccaacgctatgtcctgatagcggtccgccacacccagccggccacagtcgatgaatccagaaaagcggccattttccaccatgatattcggcaagcaggcatcgccatgggtcacgacgagatcctcgccgtcgggcatgcgcgccttgagcctggcgaacagttcggctggcgcgagcccctgatgctcttcgtccagatcatcctgatcgacaagaccggcttccatccgagtacgtgctcgctcgatgcgatgtttcgcttggtggtcgaatgggcaggtagccggatcaagcgtatgcagccgccgcattgcatcagccatgatggatactttctcggcaggagcaaggtgagatgacaggagatcctgccccggcacttcgcccaatagcagccagtcccttcccgcttcagtgacaacgtcgagcacagctgcgcaaggaacgcccgtcgtggccagccacgatagccgcgctgcctcgtcctgcagttcattcagggcaccggacaggtcggtcttgacaaaaagaaccgggcgcccctgcgctgacagccggaacacggcggcatcagagcagccgattgtctgttgtgcccagtcatagccgaatagcctctccacccaagcggccggagaacctgcgtgcaatccatcttgttcaatcatgcgaaacgatcctcatcctgtctcttgatcagatccgaaaatggatatacaagctcccgggagctttttgcaaaagcctaggcctccaaaaaagcctcctcactacttctggaatagctcagaggcagaggcggcctcggcctctgcataaataaaaaaaattagtcagccatggggcggagaatgggcggaactgggcggagttaggggcgggatgggcggagttaggggcgggactatggttgctgactaattgagatgcatgctttgcatacttctgcctgctggggagcctggggactttccacacctggttgctgactaattgagatgcatgctttgcatacttctgcctgctggggagcctggggactttccacaccctaaataacttcgtataatgtatactatacgaagttatctcgtgtccgataactgtaattatcggaccgtcaatcgattcgcgaggcgcgccatattgcctccctgtgttgctgttgcagggttgcttctgcctcatactggtttctcccttctggaggtggccaaaagccgggccctgtgcaaccctggtgcataaataccttatggcccctaagtagggcaggtgtgggacacgctctggcacctggggtgtgtgcaagtgctcaggaagacctgcaggcacaggtggcagtgggggtctctggctgtgctcgagcagcagctgcctggggtaagggtagtactctgtgcatgaacaatgctgcagggctcagctctgctcagaccacgaccctggcaccaacagagacctgcctggctctgtggtcatgtaaacctttacaggagctcaagacaaggctgtttattactgctctggcaggaaagaagcactggccatggtcatagagagttccagcaacaggaaagtgagagcccaagctgctgaggtaccagggctcctcaggtgcctgctgcagcagcttggacacagtcgaggaacagcaattgtacctgtgtggtggatcaggctgtgctgcctgtgaacctattctagcacatctgtcacctctgtgccactcacagggataccacccctgagacccctaccccatcagcctctgtgtgggatatggtgttgggcccaagggctctgttgcacagggagatagaggcctggggaggagggaaagcattgaggtggtgttgataccagggatgtgagcccaagcaagagatcagcagagcaaggaggaagaattgcaggtgttggggctggggaaagccccagatggctggagctggtggggccactggagatctcctcctcccatcctgctccatgctggggcagctgctgcaggctgaccagggcctgcccgggcacgttgtgaaggtcaccaaggatggagacttcagagctatctgggacacgtgttttaacgtttgatcagccttgcagcaaaacagtgttttgctctattgaacagtgttcaacaaaaacgatcagtggcctggaacacatctcctacgaagaaaggttgcgagagctgggtctggagaagagaaggctctggggcaacctccctgtggcctgtcagtgcttaaaggaggctcaagagaaagatggagagagactttatacacggagctgtagcaatatgacaaggagaaatggtttaaaatggaaagagggtagatttaggttagctatcaagaagaaattcttcactcagaggtgatgaagcactgtagcaggttgcccagagaagtattggatgcttccttcctggcagggcccaaggccagactggatgggttctgggcagcctgttctggtgggagatgtccctgcctgtggcatggcttggaaatgggtagcctttgaggtccctctcagcccaaatcattctatgttcttgtggttccctgcatttcagcctttgcctgttgactctggtgccactgttggacaattctactcagctgcgtttcatccctgccccaaagcagtaatcccatggataagcaatgctctgaggccttcaccaccctcagggctcctgctgaccctagcggcctccctggcagcatgagccctttgttgtccgcactgctgctgccgagggtcctgccagccccccagggccttttctgcccaggcactgccacctgctaaaacccagcctgcccatggcagggcatcgcatgtctgagggatggaacggggcaagggcagtgctgcaggcagtggttcaagaaacgtttagatgttgtactgagggatgtggtttagtgggaaatactggtgataggtggatggttggactggaggatcttagaggtcttttccaaccttggtgattatgtgattctatgaagggagccatagcctgctcccatcatgccccgccagtccggctctcccgagcactttggttccgcagcatgcggccgcaagggcgaattcgcggccgctaaattcaattcgccctatagtgagtcgtattacaattcactggccgtcgttttacaacgtcgtgactgggaaaaccctggcgttacccaacttaatcgccttgcagcacatccccctttcgccagctggcgtaatagcgaagaggcccgcaccgatcgcccttcccaacagttgcgcagcctatacgtacggcagtttaaggtttacacctataaaagagagagccgttatcgtctgtttgtggatgtacagagtgatattattgacacgccggggcgacggatggtgatccccctggccagtgcacgtctgctgtcagataaagtctcccgtgaactttacccggtggtgcatatcggggatgaaagctggcgcatgatgaccaccgatatggccagtgtgccggtctccgttatcggggaagaagtggctgatctcagccaccgcgaaaatgacatcaaaaacgccattaacctgatgttctggggaatataaatgtcaggcatgagattatcaaaaaggatcttcacctagatccttttcacgtagaaagccagtccgcagaaacggtgctgaccccggatgaatgtcagctactgggctatctggacaagggaaaacgcaagcgcaaagagaaagcaggtagcttgcagtgggcttacatggcgatagctagactgggcggttttatggacagcaagcgaaccggaattgccagctggggcgccctctggtaaggttgggaagccctgcaaagtaaactggatggctttcttgccgccaaggatctgatggcgcaggggatcaagctctgatcaagagacaggatgaggatcgtttcgcatgattgaacaagatggattgcacgcaggttctccggccgcttgggtggagaggctattcggctatgactgggcacaacagacaatcggctgctctgatgccgccgtgttccggctgtcagcgcaggggcgcccggttctttttgtcaagaccgacctgtccggtgccctgaatgaactgcaagacgaggcagcgcggctatcgtggctggccacgacgggcgttccttgcgcagctgtgctcgacgttgtcactgaagcgggaagggactggctgctattgggcgaagtgccggggcaggatctcctgtcatctcaccttgctcctgccgagaaagtatccatcatggctgatgcaatgcggcggctgcatacgcttgatccggctacctgcccattcgaccaccaagcgaaacatcgcatcgagcgagcacgtactcggatggaagccggtcttgtcgatcaggatgatctggacgaagagcatcaggggctcgcgccagccgaactgttcgccaggctcaaggcgagcatgcccgacggcgaggatctcgtcgtgacccatggcgatgcctgcttgccgaatatcatggtggaaaatggccgcttttctggattcatcgactgtggccggctgggtgtggcggaccgctatcaggacatagcgttggctacccgtgatattgctgaagagcttggcggcgaatgggctgaccgcttcctcgtgctttacggtatcgccgctcccgattcgcagcgcatcgccttctatcgccttcttgacgagttcttctgaattattaacgcttacaatttcctgatgcggtattttctccttacgcatctgtgcggtatttcacaccgcatcaggtggcacttttcggggaaatgtgcgcggaacccctatttgtttatttttctaaatacattcaaatatgtatccgctcatgagattatcaaaaaggatcttcacctagatccttttaaattaaaaatgaagttttaaatcaatctaaagtatatatgagtaaacttggtctgacagttaccaatgcttaatcagtgaggcacctatctcagcgatctgtctatttcgttcatccatagttgcctgactccccgtcgtgtagataactacgatacgggagggcttaccatctggccccagtgctgcaatgataccgcgagacccacgctcaccggctccagatttatcagcaataaaccagccagccggaagggccgagcgcagaagtggtcctgcaactttatccgcctccatccagtctattaattgttgccgggaagctagagtaagtagttcgccagttaatagtttgcgcaacgttgttgccattgctacaggcatcgtggtgtcacgctcgtcgtttggtatggcttcattcagctccggttcccaacgatcaaggcgagttacatgatcccccatgttgtgcaaaaaagcggttagctccttcggtcctccgatcgttgtcagaagtaagttggccgcagtgttatcactcatggttatggcagcactgcataattctcttactgtcatgccatccgtaagatgcttttctgtgactggtgagtactcaaccaagtcattctgagaatagtgtatgcggcgaccgagttgctcttgcccggcgtcaatacgggataataccgcgccacatagcagaactttaaaagtgctcatcattggaaaacgttcttcggggcgaaaactctcaaggatcttaccgctgttgagatccagttcgatgtaacccactcgtgcacccaactgatcttcagcatcttttactttcaccagcgtttctgggtgagcaaaaacaggaaggcaaaatgccgcaaaaaagggaataagggcgacacggaaatgttgaatactcatactcttcctttttcaatattattgaagcatttatcagggttattgtctcatgaccaaaatcccttaacgtgagttttcgttccactgagcgtcagaccccgtagaaaagatcaaaggatcttcttgagatcctttttttctgcgcgtaatctgctgcttgcaaacaaaaaaaccaccgctaccagcggtggtttgtttgccggatcaagagctaccaactctttttccgaaggtaactggcttcagcagagcgcagataccaaatactgttcttctagtgtagccgtagttaggccaccacttcaagaactctgtagcaccgcctacatacctcgctctgctaatcctgttaccagtggctgctgccagtggcgataagtcgtgtcttaccgggttggactcaagacgatagttaccggataaggcgcagcggtcgggctgaacggggggttcgtgcacacagcccagcttggagcgaacgacctacaccgaactgagatacctacagcgtgagctatgagaaagcgccacgcttcccgaagggagaaaggcggacaggtatccggtaagcggcagggtcggaacaggagagcgcacgagggagcttccagggggaaacgcctggtatctttatagtcctgtcgggtttcgccacctctgacttgagcgtcgatttttgtgatgctcgtcaggggggcggagcctatggaaaaacgccagcaacgcggcctttttacggttcctggccttttgctggccttttgctcacatgttctttcctgcgttatcccctgattctgtggataaccgtattaccgcctttgagtgagctgataccgctcgccgcagccgaacgaccgagcgcagcgagtcagtgagcgaggaagcggaag

SEQ ID NO: 28 - DNA, 11071 bp, Artificial Sequence
  Targeting vector
agcgcccaatacgcaaaccgcctctccccgcgcgttggccgattcattaatgcagctggcacgacaggtttcccgactggaaagcgggcagtgagcgcaacgcaattaatgtgagttagctcactcattaggcaccccaggctttacactttatgcttccggctcgtatgttgtgtggaattgtgagcggataacaatttcacacaggaaacagctatgaccatgattacgccaagctcagaattaaccctcactaaagggactagtcctgcaggtttaaacgaattcgcccttgtcgacgggtatcacgtggggcaaatcgagagctaccattggctatggggaggagaaaatgaggcgtgctacttcctcgttcctgcagtgcgtgtcgaggtgccgtgttggtcggatctcagtggcagagcaggatggtgagcggtggccttggggccgctccctcactctgctgggctggtgcggtggctccgggaccggactttcagtggtgtttggtgtggtgctcactgtcctttggtgtcactgtgtggtgaattccctcagctgggcggtgagagcccatgctgtgtcctggtaggagtagtctgggctgcagtgcgggctctttgtgcgtgttgggggcggttccctggaagctaattctggaagaaatcccggctgcctctgtaacagttgttggcgatgtcaaacaccctggagctgctgactggctctgtaccattgagtgatgcagtttaaacctctctctttcctcctgctgtgtgtgaagctggtgttagtgctaggagacctgcacatccctcaccgatgcagtggtttaccagcaaagttcaagagcctcctggttccagggaagattcagcatattttgtgtacaggaaacctctgcaccaaggagagctatgactacctcaggactttggctggagatgttcacgttgttaagggggactctgaggtaatgttcttgctgctgtgaattcctcagtcctccatcttacaagccgtagttgtcccactgaaagctgggaaacccttcggtgtttgcaattcctgagcgctaatgtgtgggggaaggatgtaggaacaaataaggctcaagagacaacaacttcctaggctcctcttattgcccttgtggtaagggaggacttggtgtgtagtggtaatacatgcactcaacttattaagttctcatagctgctgtgaagctgctgcagtccctcagatccctgcaggaagaggggactgactgactgttgaatagccttgaagctcctgctctgcatgtggttccggtcaggctcaagatcccagttcttagctcttcagttgctcttctgggggtatagtactagcatctgggtcactgcagatggacagagactgtgcttgggtagcaaaaggcagacttacgttgtgaaaccttcattgtgttggtgaggttctttgatttctaccttgtgtatctctcttcctcagagtctgaattatcctgaacagaaggttgtaactgttgggcagttcagaattgggttgattcatggccatcaagtcattccctggggtgatgtggcaagcttggcattgctgcagaggcagctggatgtagacattcttatctcaggacatacacacagatttgaagcatttgagcatgaaaataagttctacatcaacccaggatcagctacaggagcctacactggtttacaaacgtgagtacaatgagccttgtgtttgtctttaagacagatgtctgtccttaagagtgcagcccatgtgttgaagagcactggtgagatgcagtgccatgcaggccatctctccctttcccagagaacacggcctacctctctctgttcataaggtcttggttaacttatgagttggccagcacagcctggcactgatgtgtcatgatcataaccctgagcccacgctctgctatgctgttgcttcttagagttgcattgccttgaggtgtattccagaagctgtgtgctgagctcttgttgggaaagaggccctcagggcactgccaacatctgaggcttgcaggagctggaacattcagccctgagggctgctctggccaactgcagctctgagtctgcagtcagtgcctctgagctgtgatgcttctcagataactgcagccctttgcaatgtaatgttttataatatatttccataggacatcttggtaagaggtgtaagctaatcagggtgattgacaaagtatgttttctttccaggaacgtcattccttcatttgtactgatggatatccaggcttccacagttgtgacttatgtataccagctaattgaggacgatgtgaaagtagaaagaattgagttcaagaaatactgacacgtgtttgaatctgcctgctgacttctcactgcctctcattctttctctcctagttaaagctgaatccggccacgtgggggtgctgctgcagcggcgtgtaactgtgagcttgggaagttctcaactagggcttagagcaggagaaactgattaacagaaattgccttattaaatgtatatatttcctgtgtctaagaacgaggtgctgttgttcctgacttgcggagctgcagctagtggtagcttggaatttaacctctcctgtaaaatgagcatagaataaaacagtattttcacatttctggatcctgttaattgtttgttaattaagaggacaggaattcagtgtcagggggctgctctttgcttcccaatgtgtaccactgaagcctctctggatttatcagagatactcaatggactcttaacagcactgtggcacctgacctcctgctgccttcagcctcccttcctggctggtgtgcttatgttgaggagctgtgggaggctggtgcagttctgtgggatgaggtaaggccagctgaatagcctgggggctggtcagggggcttagtgagaggagcagggctggggaatgttgtgaacagcaggtggtgccactgctattctgaggaaggaggcagcttctgcaaatgctttgcaatgcaggatgacaaagtgcttctgctagccctagtcaatttctgagaactgtcattctcggaatacctcgatcgataacttcgtataatgtatactatacgaagttattttatttgtgaaatttgtgatgctattgctttatttgtaaccattataagctgcaataaacaagttggggtgggcgaagaactccagcatgagatccccgcgctggaggatcatccagccggcgtcccggaaaacgattccgaagcccaacctttcatagaaggcggcggtggaatcgaaatctcgtgatggcaggttgggcgtcgcttggtcggtcatttcgaaccccagagtcccgctcagaagaactcgtcaagaaggcgatagaaggcgatgcgctgcgaatcgggagcggcgataccgtaaagcacgaggaagcggtcagcccattcgccgccaagctcttcagcaatatcacgggtagccaacgctatgtcctgatagcggtccgccacacccagccggccacagtcgatgaatccagaaaagcggccattttccaccatgatattcggcaagcaggcatcgccatgggtcacgacgagatcctcgccgtcgggcatgcgcgccttgagcctggcgaacagttcggctggcgcgagcccctgatgctcttcgtccagatcatcctgatcgacaagaccggcttccatccgagtacgtgctcgctcgatgcgatgtttcgcttggtggtcgaatgggcaggtagccggatcaagcgtatgcagccgccgcattgcatcagccatgatggatactttctcggcaggagcaaggtgagatgacaggagatcctgccccggcacttcgcccaatagcagccagtcccttcccgcttcagtgacaacgtcgagcacagctgcgcaaggaacgcccgtcgtggccagccacgatagccgcgctgcctcgtcctgcagttcattcagggcaccggacaggtcggtcttgacaaaaagaaccgggcgcccctgcgctgacagccggaacacggcggcatcagagcagccgattgtctgttgtgcccagtcatagccgaatagcctctccacccaagcggccggagaacctgcgtgcaatccatcttgttcaatcatgcgaaacgatcctcatcctgtctcttgatcagatccgaaaatggatatacaagctcccgggagctttttgcaaaagcctaggcctccaaaaaagcctcctcactacttctggaatagctcagaggcagaggcggcctcggcctctgcataaataaaaaaaattagtcagccatggggcggagaatgggcggaactgggcggagttaggggcgggatgggcggagttaggggcgggactatggttgctgactaattgagatgcatgctttgcatacttctgcctgctggggagcctggggactttccacacctggttgctgactaattgagatgcatgctttgcatacttctgcctgctggggagcctggggactttccacaccctaaataacttcgtataatgtatactatacgaagttatctcgtgtccgataactgtaattatcggaccgtcaatcgattcgcgacagtctgccctgactcagcctgcctccgtgtctgggtctcctggacagtcgatcaccatctcctgcactggaaccagctcaagtgacgttggtggttataactatgtctcctggtaccaacaaaacccaggcaaagcccccaaactcatgatttatgatgtcagttcaaatcggccctcagggatttctaatcgcttctctggctccaagtctggcaacacggcctccctgaccatctctgggctccaggctgacgacgaggctgattattactgcacctcatatacaaacgacggtagcaattctcaggtattcggcggagggaccaagctgaccgtcctaggtgcctgacacacacagccctccccagactgtgggatgaggccctgtgcccgcagtcacatgtggaatatcaagacacacacatctatgacaatcaccagtctgccctgactcagcctgcctccgtgtctgggtctcctggacagtcgatcaccatctcctgcactggaaccagcagtgacgttggttataactatgtctcctggtaccaacaaaacccaggcaaagcccccaaactcatgatttatgatggtaatcggccctcagggatttctaatcgcttctctggctccaagtctggcaacacggcctccctgaccatctctgggctccaggctgacgacgaggctgattattactgcacctcatatacaaacgacagctctcaggtattcggcggagggaccaagctgaccgtcctaggtggcgcgccatattgcctccctgtgttgctgttgcagggttgcttctgcctcatactggtttctcccttctggaggtggccaaaagccgggccctgtgcaaccctggtgcataaataccttatggcccctaagtagggcaggtgtgggacacgctctggcacctggggtgtgtgcaagtgctcaggaagacctgcaggcacaggtggcagtgggggtctctggctgtgctcgagcagcagctgcctggggtaagggtagtactctgtgcatgaacaatgctgcagggctcagctctgctcagaccacgaccctggcaccaacagagacctgcctggctctgtggtcatgtaaacctttacaggagctcaagacaaggctgtttattactgctctggcaggaaagaagcactggccatggtcatagagagttccagcaacaggaaagtgagagcccaagctgctgaggtaccagggctcctcaggtgcctgctgcagcagcttggacacagtcgaggaacagcaattgtacctgtgtggtggatcaggctgtgctgcctgtgaacctattctagcacatctgtcacctctgtgccactcacagggataccacccctgagacccctaccccatcagcctctgtgtgggatatggtgttgggcccaagggctctgttgcacagggagatagaggcctggggaggagggaaagcattgaggtggtgttgataccagggatgtgagcccaagcaagagatcagcagagcaaggaggaagaattgcaggtgttggggctggggaaagccccagatggctggagctggtggggccactggagatctcctcctcccatcctgctccatgctggggcagctgctgcaggctgaccagggcctgcccgggcacgttgtgaaggtcaccaaggatggagacttcagagctatctgggacacgtgttttaacgtttgatcagccttgcagcaaaacagtgttttgctctattgaacagtgttcaacaaaaacgatcagtggcctggaacacatctcctacgaagaaaggttgcgagagctgggtctggagaagagaaggctctggggcaacctccctgtggcctgtcagtgcttaaaggaggctcaagagaaagatggagagagactttatacacggagctgtagcaatatgacaaggagaaatggtttaaaatggaaagagggtagatttaggttagctatcaagaagaaattcttcactcagaggtgatgaagcactgtagcaggttgcccagagaagtattggatgcttccttcctggcagggcccaaggccagactggatgggttctgggcagcctgttctggtgggagatgtccctgcctgtggcatggcttggaaatgggtagcctttgaggtccctctcagcccaaatcattctatgttcttgtggttccctgcatttcagcctttgcctgttgactctggtgccactgttggacaattctactcagctgcgtttcatccctgccccaaagcagtaatcccatggataagcaatgctctgaggccttcaccaccctcagggctcctgctgaccctagcggcctccctggcagcatgagccctttgttgtccgcactgctgctgccgagggtcctgccagccccccagggccttttctgcccaggcactgccacctgctaaaacccagcctgcccatggcagggcatcgcatgtctgagggatggaacggggcaagggcagtgctgcaggcagtggttcaagaaacgtttagatgttgtactgagggatgtggtttagtgggaaatactggtgataggtggatggttggactggaggatcttagaggtcttttccaaccttggtgattatgtgattctatgaagggagccatagcctgctcccatcatgccccgccagtccggctctcccgagcactttggttccgcagcatgcggccgcaagggcgaattcgcggccgctaaattcaattcgccctatagtgagtcgtattacaattcactggccgtcgttttacaacgtcgtgactgggaaaaccctggcgttacccaacttaatcgccttgcagcacatccccctttcgccagctggcgtaatagcgaagaggcccgcaccgatcgcccttcccaacagttgcgcagcctatacgtacggcagtttaaggtttacacctataaaagagagagccgttatcgtctgtttgtggatgtacagagtgatattattgacacgccggggcgacggatggtgatccccctggccagtgcacgtctgctgtcagataaagtctcccgtgaactttacccggtggtgcatatcggggatgaaagctggcgcatgatgaccaccgatatggccagtgtgccggtctccgttatcggggaagaagtggctgatctcagccaccgcgaaaatgacatcaaaaacgccattaacctgatgttctggggaatataaatgtcaggcatgagattatcaaaaaggatcttcacctagatccttttcacgtagaaagccagtccgcagaaacggtgctgaccccggatgaatgtcagctactgggctatctggacaagggaaaacgcaagcgcaaagagaaagcaggtagcttgcagtgggcttacatggcgatagctagactgggcggttttatggacagcaagcgaaccggaattgccagctggggcgccctctggtaaggttgggaagccctgcaaagtaaactggatggctttcttgccgccaaggatctgatggcgcaggggatcaagctctgatcaagagacaggatgaggatcgtttcgcatgattgaacaagatggattgcacgcaggttctccggccgcttgggtggagaggctattcggctatgactgggcacaacagacaatcggctgctctgatgccgccgtgttccggctgtcagcgcaggggcgcccggttctttttgtcaagaccgacctgtccggtgccctgaatgaactgcaagacgaggcagcgcggctatcgtggctggccacgacgggcgttccttgcgcagctgtgctcgacgttgtcactgaagcgggaagggactggctgctattgggcgaagtgccggggcaggatctcctgtcatctcaccttgctcctgccgagaaagtatccatcatggctgatgcaatgcggcggctgcatacgcttgatccggctacctgcccattcgaccaccaagcgaaacatcgcatcgagcgagcacgtactcggatggaagccggtcttgtcgatcaggatgatctggacgaagagcatcaggggctcgcgccagccgaactgttcgccaggctcaaggcgagcatgcccgacggcgaggatctcgtcgtgacccatggcgatgcctgcttgccgaatatcatggtggaaaatggccgcttttctggattcatcgactgtggccggctgggtgtggcggaccgctatcaggacatagcgttggctacccgtgatattgctgaagagcttggcggcgaatgggctgaccgcttcctcgtgctttacggtatcgccgctcccgattcgcagcgcatcgccttctatcgccttcttgacgagttcttctgaattattaacgcttacaatttcctgatgcggtattttctccttacgcatctgtgcggtatttcacaccgcatcaggtggcacttttcggggaaatgtgcgcggaacccctatttgtttatttttctaaatacattcaaatatgtatccgctcatgagattatcaaaaaggatcttcacctagatccttttaaattaaaaatgaagttttaaatcaatctaaagtatatatgagtaaacttggtctgacagttaccaatgcttaatcagtgaggcacctatctcagcgatctgtctatttcgttcatccatagttgcctgactccccgtcgtgtagataactacgatacgggagggcttaccatctggccccagtgctgcaatgataccgcgagacccacgctcaccggctccagatttatcagcaataaaccagccagccggaagggccgagcgcagaagtggtcctgcaactttatccgcctccatccagtctattaattgttgccgggaagctagagtaagtagttcgccagttaatagtttgcgcaacgttgttgccattgctacaggcatcgtggtgtcacgctcgtcgtttggtatggcttcattcagctccggttcccaacgatcaaggcgagttacatgatcccccatgttgtgcaaaaaagcggttagctccttcggtcctccgatcgttgtcagaagtaagttggccgcagtgttatcactcatggttatggcagcactgcataattctcttactgtcatgccatccgtaagatgcttttctgtgactggtgagtactcaaccaagtcattctgagaatagtgtatgcggcgaccgagttgctcttgcccggcgtcaatacgggataataccgcgccacatagcagaactttaaaagtgctcatcattggaaaacgttcttcggggcgaaaactctcaaggatcttaccgctgttgagatccagttcgatgtaacccactcgtgcacccaactgatcttcagcatcttttactttcaccagcgtttctgggtgagcaaaaacaggaaggcaaaatgccgcaaaaaagggaataagggcgacacggaaatgttgaatactcatactcttcctttttcaatattattgaagcatttatcagggttattgtctcatgaccaaaatcccttaacgtgagttttcgttccactgagcgtcagaccccgtagaaaagatcaaaggatcttcttgagatcctttttttctgcgcgtaatctgctgcttgcaaacaaaaaaaccaccgctaccagcggtggtttgtttgccggatcaagagctaccaactctttttccgaaggtaactggcttcagcagagcgcagataccaaatactgttcttctagtgtagccgtagttaggccaccacttcaagaactctgtagcaccgcctacatacctcgctctgctaatcctgttaccagtggctgctgccagtggcgataagtcgtgtcttaccgggttggactcaagacgatagttaccggataaggcgcagcggtcgggctgaacggggggttcgtgcacacagcccagcttggagcgaacgacctacaccgaactgagatacctacagcgtgagctatgagaaagcgccacgcttcccgaagggagaaaggcggacaggtatccggtaagcggcagggtcggaacaggagagcgcacgagggagcttccagggggaaacgcctggtatctttatagtcctgtcgggtttcgccacctctgacttgagcgtcgatttttgtgatgctcgtcaggggggcggagcctatggaaaaacgccagcaacgcggcctttttacggttcctggccttttgctggccttttgctcacatgttctttcctgcgttatcccctgattctgtggataaccgtattaccgcctttgagtgagctgataccgctcgccgcagccgaacgaccgagcgcagcgagtcagtgagcgaggaagcggaag

SEQ ID NO: 29 - DNA, 2787 bp, Homo sapiens
cctccaccaagggcccatcggtcttccccctggcaccctcctccaagagcacctctgggggcacagcggccctgggctgcctggtcaaggactacttccccgaaccggtgacggtgtcgtggaactcaggcgccctgaccagcggcgtgcacaccttcccggctgtcctacagtcctcaggactctactccctcagcagcgtggtgaccgtgccctccagcagcttgggcacccagacctacatctgcaacgtgaatcacaagcccagcaacaccaaggtggacaagagagttgagcccaaatcttgtgacaaaactcacacatgcccaccgtgcccaggtaagtcactagaccagagctccactcccgggagaatggtaagtgctgtaaacatccctgcactagaggataagccatgtacagatccatttccatctctcctcatcagcacctgaactcctggggggaccgtcagtcttcctcttccccccaaaacccaaggacaccctcatgatctcccggacccctgaggtcacatgcgtggtggtggacgtgagccacgaagaccctgaggtcaagttcaactggtacgtggacggcgtggaggtgcataatgccaagacaaagccgcgggaggagcagtacaacagcacgtaccgtgtggtcagcgtcctcaccgtcctgcaccaggactggctgaatggcaaggagtacaagtgcaaggtctccaacaaagccctcccagcccccatcgagaaaaccatctccaaagccaaaggtgagagctgcagcctgactgcatgggggctgggatgggcataaggataaaggtctgtgtggacagccttctgcttcagccatgacctttgtgtatgtttctaccctcacagggcagccccgagaaccacaggtgtacaccctgcccccatcccgggaggagatgaccaagaaccaggtcagcctgacctgcctggtcaaaggcttctatcccagcgacatcgccgtggagtgggagagcaatgggcagccggagaacaactacaagaccacgcctcccgtgctggactccgacggctccttcttcctctatagcaagctcaccgtggacaagagcaggtggcagcaggggaacgtcttctcatgctccgtgatgcatgaggctctgcacaaccactacacgcagaagagcctctccctgtccccgggtaaatgagctcagcacccacaaaactctcaggtccaaagagacacccacactcatctccatgcttcccttgtataaataaagcacccagcaatgcctgggaccatgtaaaactgtcctggttctttccaaggtatagagcatagctcacaggctgatatttctggccagggttggaggacagccttgtctataggaagagaatgaggtttttgcactgcaggactcagagctcattagttatcctgccttggagtgttggggcttggctttaggcagtgccttttccttgccttcctacgaaccagcagctgccatacatagagataatcctaggaagcctcaaatggagaaggacacaaacccacctccctcaggctgttcctctatcccggccccacttctttacctaggggtttctctgagtctattgtggagttacacatggccaggggcattccagagacccttgtcatccatacactcaactcaggcagctttgcacaaacaaagtctgcacacccatacagatggctcactcttgcctgtgccatgtagggctgaggcacatggctcttgctgccccaagggagggactattagatagccacactcatgctgaatcctggcccattcaaattagcctgctgaacaccatccagtccatatagcacatgtatccacatgcacgtgtgcacaaaacgcatttaacacactgggacaacaattctgtgccctgcacagcacctatatccagcaatgtatcaccatacacacgaccaaaaattcaatgcccacgtttctgccatcacaaacagacacatctttcctctctgtggccactgcattatatgctcaacacaagacctctgaagccagatccatctctggcacctcggggtcatgcttcaaccccacatgaattatgcaaaccatagccataatggtctgaatcacttcacactgggatgttcccaagttcaggcaagacgagccacaggctctgctgatgactgaaggacagcaaagggtcagtccagctgtatagccactgttgacctgggtcacaggccctgctgaccctccaccttctcctgtactgaaggaatgaaagatgagacaagcatagagggcacttgaataatccaggtcactctgaggtccacccaaggcattattggactcaggtgggaagctgagactggtgtcccagagggaaaggaaggaaagcaggccccggggagggtctgctgtcccagtcaggctggagatctctcctctgaatccatgcagacatgtctgcctcacagggaatctctcccagcaccaaccatgttgggacaaacactgactgtcctctctgttcagagctgcaactggaggagagctgtgcggaggcgcaggacggggagctggacgggctgtggacgaccatcaccatcttcatcacactcttcctgttaagcgtgtgctacagtgccaccgtcaccttcttcaaggtgaagtggatcttctcctcggtggtggacctgaagcagaccatcatccccgactacaggaacatgatcggacagggggcctag

SEQ ID NO: 30 - DNA, 361 bp, Homo sapiens
gaggtgcagctgttggagtctgggggaggcttggtacagcctggggggtccctgagactctcctgtgcagcctctggattcacctttagcagctatgccatgagctgggtccgccaggctccagggaaggggctggagtgggtctcagctattagtggtagtggtggtagcacatactacgcagactccgtgaagggccggttcaccatctccagagacaattccaagaacacgctgtatctgcaaatgaacagcctgagagccgaggacacggccgtatattactgtgcgaaaggatatagtggctacgattactactttgactactggggccagggcaccctggtcaccgtctcctcag

SEQ ID NO: 31 - DNA, 21 bp, Artificial Sequence
  Synthetic Primer
ttcccgaagcgaaagccgcgt

SEQ ID NO: 32 - DNA, 21 bp, Artificial Sequence
  Synthetic Primer
actcaccggaggagacgatga

SEQ ID NO: 33 - DNA, 1823 bp, Gallus gallus
ttcccgaagcgaaagccgcgtgttatttttgggtgggaaagccccgattcgctcctttttttttatttattatttttgttgtttttcgtgtctttttcttctccgttttgcagctgcggcctccaggtgtccccggccgtggtatttttgggtcgaaaaagccgctttttggctcacttggaaacctttcgggcgtctccaagcggagcgttggcgggaaatggtgttttttttgggttgttttcggtcccttttttcaccatttttgtggtttttcggcccattttcggcctcccccccccccccccccttcccgtggggctgcgctccgtggagcggaatggggtcgttaattaaggttaattggtttaattaatgggccgtgcagggagaagagggccgtgcggtggttgttagccctgattaatggcttggttgaggggagagtgtaattaagtgcttcgttagcactaattaatggcttgattgagaggagagtgtaattaaatgcttcataatccctaattaatggcttggttgagacaagagtgtaattaagtgcttcattagccctgattaatggcttggttgaggggagagtgtaattaaatgcttcgttagcactaattaatggcttgattgagaggagagtgtaattaaatgcttcataatccctaattaatggcttggttgagacaagagtgtaattaagtgcttcattagccctgattaatggcttggttgagaggagagtgtaattaaatgcttcattatccctaattagggactgaattccaaggagagtgtaattaagtgcttcattatccctaattaatggcttggttgagaggagagtgtaattaaatgctttgttagccctaattaatggtttgatggagaggagagtgtaattaagtgcttcattatccctaattaatggcttggttgaggggagagtgtaattaaatgcttagttagccctaattaatggcttggttgagaggagagtgtaattgaatgcttcattatccctaattagggattgaattgagaggagagtgtaattgaatgctttgttagccctaattagggattgaattgagaggagagtgtaattaaatgcctcattatccctaattagggattgaattgagaggagagtttaattaaatgcctcattatccctaattagggactgaattccgacgagagtgtaattaagtgcttcatttagccctaattaatggcttgattgagaggagagtgtaattaaatgcttcattatccctaattagggattgaattgagaggagagtgtaattaaatgcttcattatccctaattagggattgaattgagaggagagtgtaattaaatgcttcattatccctaattaatggcttggttgagaggggagtgtaattaagtgcttcgttatccctaattagggattgaattgtgaggagatggcaattaatacttcattatccctaattaatttaattagtccctattatccctaatttaattcatggtttggttgatggaagaatgtaattaaatgctttgttatccctaattaatggtttgattgagcggagagtgtaattaaatgcttcattatcccttattaatggttgtgtggaatgtagtgtaattagaagtccctaattaatggtttaattgagagaagactgcaattagatgactcatagcccctaataagtggtttaattatgagataatcacaattacatgtttcattgtccctaattaatcgtttaattgcgagaagatcacaattaattaaatgatccctaatt

SEQ ID NO: 34 - DNA, 1358 bp, Gallus gallus
aatgttggcgcagaagggattcatatcaattaattccctgtcctcaattaatgcataattgggagtgcgatggaatcattcaataagtaatgaggacttggtgtcaaaatgccaattaagtaattaatgacacccaattaatacacaatggggattacagtggaataactcagtgaagttcatatctaaattgcaattgaataattaattacagctaattaatggatgggagactggcagtggtataacttaatgaaggaacacagtgaattcctgtctgaattgaaattaattgatttattagggctaattaatgaatggtggggttaaaaatagcattactcagcgaaggaacatgagttcatggctaaattgagattgaattattaattacaactaattgattaatgactgatgggagtaagaatggaataactcagtgaaggaacacaatggattcatggcctaattgaaattaaatggttaattagagctaattaatgaatgatggggggtggcaatggaatgatacaagaaagaaacacaatgggttcgtgtctacattgaaattaaataattaattacagctaattaataaacggcgaggttgacaatggtataactgtgaagagacagaatgagttcgtgactaaattggtattaaatgattaattagagctaattaacaggtggtggggctgagaatggcataactcaatgggggatgatgagctgatggcttaattggaattaataattaatcacaaccaattaacaggtgctgttaatggggttacaggggcatgacttcaggaagaagcacaaagtggccattaaataattaattgcacccaattaattcctgatggggattactgcagaggaactcagcgaaggattcaagcagaaatgacacagttaggttgctcaattgcgttaattaattaaaatcgctaattaggtgagcttcattaaggcctgatggggttcatcccaacgctgggatcaaagaactcagcgcagagtggataacgataattagaaggggacaaattaatgaggaaacacgactttgggcctagacggccattaaatcattaatcaacccgacgggcgcccaattaatcataaagttattaagcaattaagtcgaggctgacgagaaaccgcaacgagagccctccacgctcctttgagttggcgcaaacaacaaacaacgcgggctcgttaagcagcgacgacgccgagcgtaacgaagcaatccccgcgcccgacaattaacgcgctaacgaagccggagccctccttatgcaaattagcccctccagagggccataaaagcgccggctctccgacgg

SEQ ID NO: 35 - DNA, 28 bp, Artificial Sequence
  Synthetic Primer
ggggatcctgggtcagtcgaagggggcg

SEQ ID NO: 36 - DNA, 31 bp, Artificial Sequence
  Synthetic Primer
gtgcggccgccaaaagcggtaaaatccaccc

SEQ ID NO: 37 - DNA, 4266 bp, Gallus gallus
  misc_feature (688)..(688): n is a, c, g, or t
tgggtcagtcgaagggggcggtcggtccatcatttgcggccgggtgatttttggggccgaaaagtgggaatttggggcccaatttggggcccaatttggggcccaatttgggttttcgaggggggatttttttagggggagatttttgggtccccggaaaatggtgawtttgggtcaaaaatggggawtttgggggttckttttraggtggggttttttggggkagaaatggcggtctgaggggaaaatgtcgttttggggccattttgggccatttgaggggaaatttgggtcaaaaaatgacgattttgggtcgttttagggaggaaaatgaatttagggcgatttgagccaaatttgggtcaaaaatggcgattttgagtcaaaaaatgattattttgggtcattttagggaggaaaatgaatttagggagattggacggcaaatttgggtcaaaaaatggtgattttgggtcaaaaaatgattattttgggtcattttagggagaaaaatgaatttagggagatttgagggcaaatttgggtcaaaaaatggtgattttgggtcaaaaaatgattattttgggtcattttagggagaaaaatgaatttagggagatttgagggcaaatttgggtcgaaaaatggcgattttgggtgaaaaatggacaattttgggtcattttanggttaaaaatgaatttagggagattggacggcaaatttgggtcraaaaatggtgatttggggtsaaaaatgraywattttkggtcattttagggataaaaaatgaatttagggcgatgtgagccaattttgggtcaaaaatggcgattgtgagtcaaaaaatgattattttgggtcattttagggttaaaaatgaatttagggagattggacggcaaatttgggtcaaaaaatggtgattttcggtcaaaaaatgattattttgggtcattttagggagaaaaatgaatttagggagattggacggcaaatttgggtcgaaaaatggtgattttgggtcaaaaatggacaatttggggtcattttagggataaaaatgaatttagggagatttgagagcaaatttgggtctaaaaatgtcaatttggggtcaaaaatggtgattttgggtcattttagggatataaatgaattttgggagatttgagggcaaatttgggtcgaaaaatggtgatttggggtcaatttagggaggaaaatgaatttaaggtgatttgacggcaaatttgggttgaaaaatgacaatttggggtcattttaaagataaaatgaatttagggcgatttgagggcaaatttgggtcgaagaatggtgatttgggtcaaaaaatgacaattttgggtcattttagggatataaatggacttagagcgatttgagggcaaatttggttgaaaaaatggacaatttgggtcattttagggatataaatgaatttagggagatttgatggcaaatttgggtcgaaaaatggtgatttgggtcaaaaatggtgattttggttgaaaaacagtcatttggggtcattttagggattaaaatgaatttcgggagatttgagggcaaatttgggtcaaaaaatggtgattttgggtcaattagtgataaaaaaatgaatttagggtgatttgagggcaaatttgggtcaaaaaatgacaatttggggtttttttagggaggagaatgaatttagggagttttgagggcaaatttgggtcaaaaaatagtgatttgggtcaaaagtggtgattttggttgaaaaacagtcattttgggtcattttagggagaaaaatgaatttcgggagatttgagggcaaatttgggtcaaaaaatgacaattttgggtcactttacgaattaaaatgaatttagggagatttgagggcaaatttgggtcaaaatatggtgattttgggtcaatttagggaggaaaatgaatttagggcgatttgaaggcaaatttgggtcgaaaatggtgattttgggtcaaaaaatgatgattttgggtcgttttagggagaaaatgaatttagggagatttgagggcaaatttgggtcaaaaaatggtgattttgggtcattgtagggataaaaatgaatttggggcgatttgagggcaaatttgggtggaaaatggacaattttgggtcattttagggagaaaaatgaatttagggagatttgagggcaaatttgggtcaaaaaatggtgatttggggtcattttcagaagaaaaaatgattattttccccactaaaaatgtatattttggggccaaatggtgaaaaatggtgatttttaatcaaacgtccccaaaattggggaaatttcatcgatttgacccaaaattgagttttttttccctgttaaaaatgtacattttggggtcaatcgctgaaatgttcccacttttcacttctttgcccccaaattttgctgtccggtgagaaattaattaattaatgatcattaattgatcgacaattaatggttattaattaattaataggtcctcttttggtgactccttcgcttttggggccaaaagtccataaattggccccaaaaaattaacgctgagtaattggattccaaagtattaatgataaacattaaaagtgtttaattaataatgatattaaacataatttcgtttttattatcgatttatcaacaacgatgaacgataatactttacaacaatcgctaataattaattaattatttaattaattaatttctaataattacttcgcattatcggacacgagatgttgtaattattaataatttaattcctaataattagaagattcgttgaaaatggtacttatctttacaaataatcacttctaataataatgattaataatagttaataacaacaatgacgataatgacgataatattaataatatgtgatatatttaatataaaattcgtattaatatattatatctacaaaatatgatataaaatataatattttatttatatataacacaatttattattattatcattattatcattattaatatcatcattattaacgttatcgaaatacttatttagaaataataaaaacggatttaatgatggcaacaaaaatattttattaatgttaaaaaaaaataattaataatttccaaagattcgaattcggggcaacgaacggcactcgataatttttaattaattaatagtttgaattaatcggtactttttaatcctccattttgcccgaaatcgccgttttttgccccaaattccccaccgcggcgttaaaaacataaagaaattaagcatcaaaagtgcccttttttggggttgttttgacccaaaaaaaaaatggccgaattgggggcggccgttttacggttgggttcattttgggttcaaaacagccaaaaatgggaactttgggtttcgaaaacaacaacaacaaaaaaacgggtttattttgggctcattttgggtgtttttgggtcaggaggagaaaaaataggaagtttgagagcgaaacaacggccgcttttggggggaaaacggccctttttggtcaacggcgggggaaaaaaaaaagcggagtttttggggtgaaaaagagcggttttgggtaaatttgggttttggggtaaaagtggaggattttgggcaatgggagttaaaaaatgggtgtttttatgggggttcggtgcagtttttcctgtttgatggggggtttattaatccggggggggggattaatgagaattaataatgttaatagaaatatctgggaaattaatagcaattattaattgttaatagttattaatagttctatatatctcacatctacgatacaatataatatcgttacaatcatatagtcgatatattacatataattatcagtaataataataagtaacaataattagcagtaattaataataataattaatagtattcgttaataagattattgataataattaagtagtagcgattaatagagatgggatttcgtgagaaatggaccaaatttgggccgttttgacccaaatttttggtggttttttttccgattctttgtgaatttcgggtcggattcatcagcaattaattacggttattaggggctattagaggcttttaattgggattattagagacttttaagcggatttggggacttttaagtggattttatgattcttaagtggattttgggtggattttaccgcttttg

SEQ ID NO: 38 - DNA, 21 bp, Artificial Sequence
  Synthetic Primer
ccaaaccacctcctggtgtcc

SEQ ID NO: 39 - DNA, 27 bp, Artificial Sequence
  Synthetic Primer
caaaccaaaactacggattctctgacc

SEQ ID NO: 40 - DNA, 866 bp, Gallus gallus
caaaccacctcctggtgtcccccaacccttcatagccccccaccccgtctcggtcgcccacccaaccctccacattaaccccttcctccccacgctcgtcccccgattcccaccccccttttcgtcaccatgcaccccccgtcccgcgaggacttcgaaggccccttccgcaacgcctccatcctctgccagacccgcgggcgccgccgtcccgccgaggtcacgtggtacaaaaatggcagccccgtcgccgccgccgccgccaccaccgccaccaccgtcggccccgaagtggtggccgagagccgcatcagcgtcaccgaaagcgaatgggacaccggggccaccttcagctgcgtcgtggagggggagatgaggaacaccagcaagaggatggagtgcggatgtaagtggagggggggttttttggggggggatttggggggaaattgggggctttgggggcaaaaagtccgtcattttggtttggaaggggtcgatgtgggggaaaatgtgccaaaaatcccaattttgggggcactgaagtcgtaatttgaggtggaggaaggtagacagaaagagggtggagtgcggatgtaagtggagggggatttggggcagatttgggggaaattgggggtttggggggcaaataatccgtagtttcggtttggaaggggttgatgtggttttgtgctgaatttcgggggaaaaactgccaaaaatcccaattttgggggcattgaagtcatagtttgaggttggaaggaggtagagagcaagaggatgaagtgaggatgtaagtcgggggatttttggggcagatttgggggaaattgggggttttggggtcagagaatccgtag

SEQ ID NO: 41 - DNA, 16786 bp, Artificial Sequence
  Targeting vector
  misc_feature (5126)..(5126): n is a, c, g, or t
gcgccctagcgcccgctcctttcgctttcttcccttcctttctcgccacgttcgccggctttccccgtcaagctctaaatcgggggctccctttagggttccgatttagtgctttacggcacctcgaccccaaaaaacttgattagggtgatggttcacgtagtgggccatcgccctgatagacggtttttcgccctttgacgttggagtccacgttctttaatagtggactcttgttccaaactggaacaacactcaaccctatctcggtctattcttttgatttataagggattttgccgatttcggcctattggttaaaaaatgagctgatttaacaaaaatttaacgcgaattttaacaaaatattaacgcttacaatttccattcgccattcaggctgcgcaactgttgggaagggcgatcgggtaccataagaatgcggccgcttcccgaagcgaaagccgcgtgttatttttgggtgggaaagccccgattcgctcctttttttttatttattatttttgttgtttttcgtgtctttttcttctccgttttgcagctgcggcctccaggtgtccccggccgtggtatttttgggtcgaaaaagccgctttttggctcacttggaaacctttcgggcgtctccaagcggagcgttggcgggaaatggtgttttttttgggttgttttcggtcccttttttcaccatttttgtggtttttcggcccattttcggcctcccccccccccccccccttcccgtggggctgcgctccgtggagcggaatggggtcgttaattaaggttaattggtttaattaatgggccgtgcagggagaagagggccgtgcggtggttgttagccctgattaatggcttggttgaggggagagtgtaattaagtgcttcgttagcactaattaatggcttgattgagaggagagtgtaattaaatgcttcataatccctaattaatggcttggttgagacaagagtgtaattaagtgcttcattagccctgattaatggcttggttgaggggagagtgtaattaaatgcttcgttagcactaattaatggcttgattgagaggagagtgtaattaaatgcttcataatccctaattaatggcttggttgagacaagagtgtaattaagtgcttcattagccctgattaatggcttggttgagaggagagtgtaattaaatgcttcattatccctaattagggactgaattccaaggagagtgtaattaagtgcttcattatccctaattaatggcttggttgagaggagagtgtaattaaatgctttgttagccctaattaatggtttgatggagaggagagtgtaattaagtgcttcattatccctaattaatggcttggttgaggggagagtgtaattaaatgcttagttagccctaattaatggcttggttgagaggagagtgtaattgaatgcttcattatccctaattagggattgaattgagaggagagtgtaattgaatgctttgttagccctaattagggattgaattgagaggagagtgtaattaaatgcctcattatccctaattagggattgaattgagaggagagtttaattaaatgcctcattatccctaattagggactgaattccgacgagagtgtaattaagtgcttcatttagccctaattaatggcttgattgagaggagagtgtaattaaatgcttcattatccctaattagggattgaattgagaggagagtgtaattaaatgcttcattatccctaattagggattgaattgagaggagagtgtaattaaatgcttcattatccctaattaatggcttggttgagaggggagtgtaattaagtgcttcgttatccctaattagggattgaattgtgaggagatggcaattaatacttcattatccctaattaatttaattagtccctattatccctaatttaattcatggtttggttgatggaagaatgtaattaaatgctttgttatccctaattaatggtttgattgagcggagagtgtaattaaatgcttcattatcccttattaatggttgtgtggaatgtagtgtaattagaagtccctaattaatggtttaattgagagaagactgcaattagatgactcatagcccctaataagtggtttaattatgagataatcacaattacatgtttcattgtccctaattaatcgtttaattgcgagaagatcacaattaattaaatgatccctaatttcaatttctgagaagtgtctttctcggaaattgagatatcataagaattcgcgatcaatttctgagaactgtcattctcggaatacctgacgtcaatgttggcgcagaagggattcatatcaattaattccctgtcctcaattaatgcataattgggagtgcgatggaatcattcaataagtaatgaggacttggtgtcaaaatgccaattaagtaattaatgacacccaattaatacacaatggggattacagtggaataactcagtgaagttcatatctaaattgcaattgaataattaattacagctaattaatggatgggagactggcagtggtataacttaatgaaggaacacagtgaattcctgtctgaattgaaattaattgatttattagggctaattaatgaatggtggggttaaaaatagcattactcagcgaaggaacatgagttcatggctaaattgagattgaattattaattacaactaattgattaatgactgatgggagtaagaatggaataactcagtgaaggaacacaatggattcatggcctaattgaaattaaatggttaattagagctaattaatgaatgatggggggtggcaatggaatgatacaagaaagaaacacaatgggttcgtgtctacattgaaattaaataattaattacagctaattaataaacggcgaggttgacaatggtataactgtgaagagacagaatgagttcgtgactaaattggtattaaatgattaattagagctaattaacaggtggtggggctgagaatggcataactcaatgggggatgatgagctgatggcttaattggaattaataattaatcacaaccaattaacaggtgctgttaatggggttacaggggcatgacttcaggaagaagcacaaagtggccattaaataattaattgcacccaattaattcctgatggggattactgcagaggaactcagcgaaggattcaagcagaaatgacacagttaggttgctcaattgcgttaattaattaaaatcgctaattaggtgagcttcattaaggcctgatggggttcatcccaacgctgggatcaaagaactcagcgcagagtggataacgataattagaaggggacaaattaatgaggaaacacgactttgggcctagacggccattaaatcattaatcaacccgacgggcgcccaattaatcataaagttattaagcaattaagtcgaggctgacgagaaaccgcaacgagagccctccacgctcctttgagttggcgcaaacaacaaacaacgcgggctcgttaagcagcgacgacgccgagcgtaacgaagcaatccccgcgcccgacaattaacgcgctaacgaagccggagccctccttatgcaaattagcccctccagagggccataaaagcgccggctctccgacggcgcgggaggagcaccagtcggctccgcaaccatgagcccactcgtctcctccctcctgctcctggccgccctgccaggtgagggcgctgtggggctctatggggctctatggggtctcagcggggctctgcgggctcaatgggggccaaagggggggtctgcgggctctatgggggggtcaacggggggtctcacggggggccggctccgcgaggccgtgtggcggcggctccgtcagcgctctctgggcgcgcctccttccccacagggctgatggcggaggtgcagctgttggagtctgggggaggcttggtacagcctggggggtccctgagactctcctgtgcagcctctggattcacctttagcagctatgccatgagctgggtccgccaggctccagggaaggggctggagtgggtctcagctattagtggtagtggtggtagcacatactacgcagactccgtgaagggccggttcaccatctccagagacaattccaagaacacgctgtatctgcaaatgaacagcctgagagccgaggacacggccgtatattactgtgcgaaaggatatagtggctacgattactactttgactactggggccagggcaccctggtcaccgtctcctcaggtgagtcttcatatgaaccccccccaaaattgccgcggcgattttggggcaaaatcgggcgattttatggatcctgggtcagtcgaagggggcggtcggtccatcatttgcggccgggtgatttttggggccgaaaagtgggaatttggggcccaatttggggcccaatttggggcccaatttgggttttcgaggggggatttttttagggggagatttttgggtccccggaaaatggtgawtttgggtcaaaaatggggawtttgggggttckttttraggtggggttttttggggkagaaatggcggtctgaggggaaaatgtcgttttggggccattttgggccatttgaggggaaatttgggtcaaaaaatgacgattttgggtcgttttagggaggaaaatgaatttagggcgatttgagccaaatttgggtcaaaaatggcgattttgagtcaaaaaatgattattttgggtcattttagggaggaaaatgaatttagggagattggacggcaaatttgggtcaaaaaatggtgattttgggtcaaaaaatgattattttgggtcattttagggagaaaaatgaatttagggagatttgagggcaaatttgggtcaaaaaatggtgattttgggtcaaaaaatgattattttgggtcattttagggagaaaaatgaatttagggagatttgagggcaaatttgggtcgaaaaatggcgattttgggtgaaaaatggacaattttgggtcattttanggttaaaaatgaatttagggagattggacggcaaatttgggtcraaaaatggtgatttggggtsaaaaatgraywattttkggtcattttagggataaaaaatgaatttagggcgatgtgagccaattttgggtcaaaaatggcgattgtgagtcaaaaaatgattattttgggtcattttagggttaaaaatgaatttagggagattggacggcaaatttgggtcaaaaaatggtgattttcggtcaaaaaatgattattttgggtcattttagggagaaaaatgaatttagggagattggacggcaaatttgggtcgaaaaatggtgattttgggtcaaaaatggacaatttggggtcattttagggataaaaatgaatttagggagatttgagagcaaatttgggtctaaaaatgtcaatttggggtcaaaaatggtgattttgggtcattttagggatataaatgaattttgggagatttgagggcaaatttgggtcgaaaaatggtgatttggggtcaatttagggaggaaaatgaatttaaggtgatttgacggcaaatttgggttgaaaaatgacaatttggggtcattttaaagataaaatgaatttagggcgatttgagggcaaatttgggtcgaagaatggtgatttgggtcaaaaaatgacaattttgggtcattttagggatataaatggacttagagcgatttgagggcaaatttggttgaaaaaatggacaatttgggtcattttagggatataaatgaatttagggagatttgatggcaaatttgggtcgaaaaatggtgatttgggtcaaaaatggtgattttggttgaaaaacagtcatttggggtcattttagggattaaaatgaatttcgggagatttgagggcaaatttgggtcaaaaaatggtgattttgggtcaattagtgataaaaaaatgaatttagggtgatttgagggcaaatttgggtcaaaaaatgacaatttggggtttttttagggaggagaatgaatttagggagttttgagggcaaatttgggtcaaaaaatagtgatttgggtcaaaagtggtgattttggttgaaaaacagtcattttgggtcattttagggagaaaaatgaatttcgggagatttgagggcaaatttgggtcaaaaaatgacaattttgggtcactttacgaattaaaatgaatttagggagatttgagggcaaatttgggtcaaaatatggtgattttgggtcaatttagggaggaaaatgaatttagggcgatttgaaggcaaatttgggtcgaaaatggtgattttgggtcaaaaaatgatgattttgggtcgttttagggagaaaatgaatttagggagatttgagggcaaatttgggtcaaaaaatggtgattttgggtcattgtagggataaaaatgaatttggggcgatttgagggcaaatttgggtggaaaatggacaattttgggtcattttagggagaaaaatgaatttagggagatttgagggcaaatttgggtcaaaaaatggtgatttggggtcattttcagaagaaaaaatgattattttccccactaaaaatgtatattttggggccaaatggtgaaaaatggtgatttttaatcaaacgtccccaaaattggggaaatttcatcgatttgacccaaaattgagttttttttccctgttaaaaatgtacattttggggtcaatcgctgaaatgttcccacttttcacttctttgcccccaaattttgctgtccggtgagaaattaattaattaatgatcattaattgatcgacaattaatggttattaattaattaataggtcctcttttggtgactccttcgcttttggggccaaaagtccataaattggccccaaaaaattaacgctgagtaattggattccaaagtattaatgataaacattaaaagtgtttaattaataatgatattaaacataatttcgtttttattatcgatttatcaacaacgatgaacgataatactttacaacaatcgctaataattaattaattatttaattaattaatttctaataattacttcgcattatcggacacgagatgttgtaattattaataatttaattcctaataattagaagattcgttgaaaatggtacttatctttacaaataatcacttctaataataatgattaataatagttaataacaacaatgacgataatgacgataatattaataatatgtgatatatttaatataaaattcgtattaatatattatatctacaaaatatgatataaaatataatattttatttatatataacacaatttattattattatcattattatcattattaatatcatcattattaacgttatcgaaatacttatttagaaataataaaaacggatttaatgatggcaacaaaaatattttattaatgttaaaaaaaaataattaataatttccaaagattcgaattcggggcaacgaacggcactcgataatttttaattaattaatagtttgaattaatcggtactttttaatcctccattttgcccgaaatcgccgttttttgccccaaattccccaccgcggcgttaaaaacataaagaaattaagcatcaaaagtgcccttttttggggttgttttgacccaaaaaaaaaatggccgaattgggggcggccgttttacggttgggttcattttgggttcaaaacagccaaaaatgggaactttgggtttcgaaaacaacaacaacaaaaaaacgggtttattttgggctcattttgggtgtttttgggtcaggaggagaaaaaataggaagtttgagagcgaaacaacggccgcttttggggggaaaacggccctttttggtcaacggcgggggaaaaaaaaaagcggagtttttggggtgaaaaagagcggttttgggtaaatttgggttttggggtaaaagtggaggattttgggcaatgggagttaaaaaatgggtgtttttatgggggttcggtgcagtttttcctgtttgatggggggtttattaatccggggggggggattaatgagaattaataatgttaatagaaatatctgggaaattaatagcaattattaattgttaatagttattaatagttctatatatctcacatctacgatacaatataatatcgttacaatcatatagtcgatatattacatataattatcagtaataataataagtaacaataattagcagtaattaataataataattaatagtattcgttaataagattattgataataattaagtagtagcgattaatagagatgggatttcgtgagaaatggaccaaatttgggccgttttgacccaaatttttggtggttttttttccgattctttgtgaatttcgggtcggattcatcagcaattaattacggttattaggggctattagaggcttttaattgggattattagagacttttaagcggatttggggacttttaagtggattttatgattcttaagtggattttgggtggattttaccgcttttgggccgccgcccccctctaaccccccatctcccccccttttctctctccccccccccccccaaaccccacagcctccaccaagggcccatcggtcttccccctggcaccctcctccaagagcacctctgggggcacagcggccctgggctgcctggtcaaggactacttccccgaaccggtgacggtgtcgtggaactcaggcgccctgaccagcggcgtgcacaccttcccggctgtcctacagtcctcaggactctactccctcagcagcgtggtgaccgtgccctccagcagcttgggcacccagacctacatctgcaacgtgaatcacaagcccagcaacaccaaggtggacaagagagttgagcccaaatcttgtgacaaaactcacacatgcccaccgtgcccaggtaagtcactagaccagagctccactcccgggagaatggtaagtgctgtaaacatccctgcactagaggataagccatgtacagatccatttccatctctcctcatcagcacctgaactcctggggggaccgtcagtcttcctcttccccccaaaacccaaggacaccctcatgatctcccggacccctgaggtcacatgcgtggtggtggacgtgagccacgaagaccctgaggtcaagttcaactggtacgtggacggcgtggaggtgcataatgccaagacaaagccgcgggaggagcagtacaacagcacgtaccgtgtggtcagcgtcctcaccgtcctgcaccaggactggctgaatggcaaggagtacaagtgcaaggtctccaacaaagccctcccagcccccatcgagaaaaccatctccaaagccaaaggtgagagctgcagcctgactgcatgggggctgggatgggcataaggataaaggtctgtgtggacagccttctgcttcagccatgacctttgtgtatgtttctaccctcacagggcagccccgagaaccacaggtgtacaccctgcccccatcccgggaggagatgaccaagaaccaggtcagcctgacctgcctggtcaaaggcttctatcccagcgacatcgccgtggagtgggagagcaatgggcagccggagaacaactacaagaccacgcctcccgtgctggactccgacggctccttcttcctctatagcaagctcaccgtggacaagagcaggtggcagcaggggaacgtcttctcatgctccgtgatgcatgaggctctgcacaaccactacacgcagaagagcctctccctgtccccgggtaaatgagctcagcacccacaaaactctcaggtccaaagagacacccacactcatctccatgcttcccttgtataaataaagcacccagcaatgcctgggaccatgtaaaactgtcctggttctttccaaggtatagagcatagctcacaggctgatatttctggccagggttggaggacagccttgtctataggaagagaatgaggtttttgcactgcaggactcagagctcattagttatcctgccttggagtgttggggcttggctttaggcagtgccttttccttgccttcctacgaaccagcagctgccatacatagagataatcctaggaagcctcaaatggagaaggacacaaacccacctccctcaggctgttcctctatcccggccccacttctttacctaggggtttctctgagtctattgtggagttacacatggccaggggcattccagagacccttgtcatccatacactcaactcaggcagctttgcacaaacaaagtctgcacacccatacagatggctcactcttgcctgtgccatgtagggctgaggcacatggctcttgctgccccaagggagggactattagatagccacactcatgctgaatcctggcccattcaaattagcctgctgaacaccatccagtccatatagcacatgtatccacatgcacgtgtgcacaaaacgcatttaacacactgggacaacaattctgtgccctgcacagcacctatatccagcaatgtatcaccatacacacgaccaaaaattcaatgcccacgtttctgccatcacaaacagacacatctttcctctctgtggccactgcattatatgctcaacacaagacctctgaagccagatccatctctggcacctcggggtcatgcttcaaccccacatgaattatgcaaaccatagccataatggtctgaatcacttcacactgggatgttcccaagttcaggcaagacgagccacaggctctgctgatgactgaaggacagcaaagggtcagtccagctgtatagccactgttgacctgggtcacaggccctgctgaccctccaccttctcctgtactgaaggaatgaaagatgagacaagcatagagggcacttgaataatccaggtcactctgaggtccacccaaggcattattggactcaggtgggaagctgagactggtgtcccagagggaaaggaaggaaagcaggccccggggagggtctgctgtcccagtcaggctggagatctctcctctgaatccatgcagacatgtctgcctcacagggaatctctcccagcaccaaccatgttgggacaaacactgactgtcctctctgttcagagctgcaactggaggagagctgtgcggaggcgcaggacggggagctggacgggctgtggacgaccatcaccatcttcatcacactcttcctgttaagcgtgtgctacagtgccaccgtcaccttcttcaaggtgaagtggatcttctcctcggtggtggacctgaagcagaccatcatccccgactacaggaacatgatcggacagggggcctaggaattaattcgctgtctgcgagggccagctgttggggtgagtactccctctcaaaagcgggcatgacttctgcgctaagattgtcagtttccaaaaacgaggaggatttgatattcacctggcccgcggtgatgcctttgagggtggccgcgtccatctggtcagaaaagacaatctttttgttgtcaagcttgaggtgtggcaggcttgagatctggccatacacttgagtgacaatgacatccactttgcctttctctccacaggtgtccactcccaggtccaactgcaggtcgagcatgcatctagggcggccaattggatcctaccgttcgtataatgtatgctatacgaagttatcgtacgcttaattaactgatccggaattccgccccccccccccccccccctctccctcccccccccctaacgttactggccgaagccgcttggaataaggccggtgtgcgtttgtctatatgttattttccaccatattgccgtcttttggcaatgtgagggcccggaaacctggccctgtcttcttgacgagcattcctaggggtctttcccctctcgccaaaggaatgcaaggtctgttgaatgtcgtgaaggaagcagttcctctggaagcttcttgaagacaaacaacgtctgtagcgaccctttgcaggcagcggaaccccccacctggcgacaggtgcctctgcggccaaaagccacgtgtataagatacacctgcaaaggcggcacaaccccagtgccacgttgtgagttggatagttgtggaaagagtcaaatggctctcctcaagcgtattcaacaaggggctgaaggatgcccagaaggtaccccattgtatgggatctgatctggggcctcggtgcacatgctttacatgtgtttagtcgaggttaaaaaaacgtctaggccccccgaaccacggggacgtggttttcctttgaaaaacacgatgataagcttgccacaaccatggctgaacaagatggattgcacgcaggttctccggccgcttgggtggagaggctattcggctatgactgggcacaacagacaatcggctgctctgatgccgccgtgttccggctgtcagcgcaggggcgcccggttctttttgtcaagaccgacctgtccggtgccctgaatgaactgcaggacgaggcagcgcggctatcgtggctggccacgacgggcgttccttgcgcagctgtgctcgacgttgtcactgaagcgggaagggactggctgctattgggcgaagtgccggggcaggatctcctgtcatctcaccttgctcctgccgagaaagtatccatcatggctgatgcaatgcggcggctgcatacgcttgatccggctacctgcccattcgaccaccaagcgaaacatcgcatcgagcgagcacgtactcggatggaagccggtcttgtcgatcaggatgatctggacgaagagcatcaggggctcgcgccagccgaactgttcgccaggctcaaggcgcgcatgcccgacggcgaggatctcgtcgtgacccatggcgatgcctgcttgccgaatatcatggtggaaaatggccgcttttctggattcatcgactgtggccggctgggtgtggcggaccgctatcaggacatagcgttggctacccgtgatattgctgaagagcttggcggcgaatgggctgaccgcttcctcgtgctttacggtatcgccgctcccgattcgcagcgcatcgccttctatcgccttcttgacgagttcttctgaataacttcgtataatgtatgctatacgaacggtaggatcccgcccgccccacgacccgcagcgcccgaccgaaaggagcgcacgaccccatggctccgaccgaagccacccggggcggccccgccgaccccgcacccgcccccgaggcccaccgactctagataactgatcataatcagccataccacatttgtagaggttttacttgctttaaaaaacctcccacacctccccctgaacctgaaacataaaatgaatgcaattgttgttgttaacttgtttattgcagcttataatggttacaaataaagcaatagcatcacaaatttcacaaataaagcatttttttcactgtatgcaaaccacctcctggtgtcccccaacccttcatagccccccaccccgtctcggtcgcccacccaaccctccacattaaccccttcctccccacgctcgtcccccgattcccaccccccttttcgtcaccatgcaccccccgtcccgcgaggacttcgaaggccccttccgcaacgcctccatcctctgccagacccgcgggcgccgccgtcccgccgaggtcacgtggtacaaaaatggcagccccgtcgccgccgccgccgccaccaccgccaccaccgtcggccccgaagtggtggccgagagccgcatcagcgtcaccgaaagcgaatgggacaccggggccaccttcagctgcgtcgtggagggggagatgaggaacaccagcaagaggatggagtgcggatgtaagtggagggggggttttttggggggggatttggggggaaattgggggctttgggggcaaaaagtccgtcattttggtttggaaggggtcgatgtgggggaaaatgtgccaaaaatcccaattttgggggcactgaagtcgtaatttgaggtggaggaaggtagacagaaagagggtggagtgcggatgtaagtggagggggatttggggcagatttgggggaaattgggggtttggggggcaaataatccgtagtttcggtttggaaggggttgatgtggttttgtgctgaatttcgggggaaaaactgccaaaaatcccaattttgggggcattgaagtcatagtttgaggttggaaggaggtagagagcaagaggatgaagtgaggatgtaagtcgggggatttttggggcagatttgggggaaattgggggttttggggtcagagaatccgtaggtcgaccgcgccagcttttgttccctttagtgagggttaattgcgcgcttggcgtaatcatggtcatagctgtttcctgtgtgaaattgttatccgctcacaattccacacaacatacgagccggaagcataaagtgtaaagcctggggtgcctaatgagtgagctaactcacattaattgcgttgcgctcactgcccgctttccagtcgggaaacctgtcgtgccagctgcattaatgaatcggccaacgcgcggggagaggcggtttgcgtattgggcgctcttccgcttcctcgctcactgactcgctgcgctcggtcgttcggctgcggcgagcggtatcagctcactcaaaggcggtaatacggttatccacagaatcaggggataacgcaggaaagaacatgtgagcaaaaggccagcaaaaggccaggaaccgtaaaaaggccgcgttgctggcgtttttccataggctccgcccccctgacgagcatcacaaaaatcgacgctcaagtcagaggtggcgaaacccgacaggactataaagataccaggcgtttccccctggaagctccctcgtgcgctctcctgttccgaccctgccgcttaccggatacctgtccgcctttctcccttcgggaagcgtggcgctttctcatagctcacgctgtaggtatctcagttcggtgtaggtcgttcgctccaagctgggctgtgtgcacgaaccccccgttcagcccgaccgctgcgccttatccggtaactatcgtcttgagtccaacccggtaagacacgacttatcgccactggcagcagccactggtaacaggattagcagagcgaggtatgtaggcggtgctacagagttcttgaagtggtggcctaactacggctacactagaaggacagtatttggtatctgcgctctgctgaagccagttaccttcggaaaaagagttggtagctcttgatccggcaaacaaaccaccgctggtagcggtggtttttttgtttgcaagcagcagattacgcgcagaaaaaaaggatctcaagaagatcctttgatcttttctacggggtctgacgctcagtggaacgaaaactcacgttaagggattttggtcatgagattatcaaaaaggatcttcacctagatccttttaaattaaaaatgaagttttaaatcaatctaaagtatatatgagtaaacttggtctgacagttaccaatgcttaatcagtgaggcacctatctcagcgatctgtctatttcgttcatccatagttgcctgactccccgtcgtgtagataactacgatacgggagggcttaccatctggccccagtgctgcaatgataccgcgagacccacgctcaccggctccagatttatcagcaataaaccagccagccggaagggccgagcgcagaagtggtcctgcaactttatccgcctccatccagtctattaattgttgccgggaagctagagtaagtagttcgccagttaatagtttgcgcaacgttgttgccattgctacaggcatcgtggtgtcacgctcgtcgtttggtatggcttcattcagctccggttcccaacgatcaaggcgagttacatgatcccccatgttgtgcaaaaaagcggttagctccttcggtcctccgatcgttgtcagaagtaagttggccgcagtgttatcactcatggttatggcagcactgcataattctcttactgtcatgccatccgtaagatgcttttctgtgactggtgagtactcaaccaagtcattctgagaatagtgtatgcggcgaccgagttgctcttgcccggcgtcaatacgggataataccgcgccacatagcagaactttaaaagtgctcatcattggaaaacgttcttcggggcgaaaactctcaaggatcttaccgctgttgagatccagttcgatgtaacccactcgtgcacccaactgatcttcagcatcttttactttcaccagcgtttctgggtgagcaaaaacaggaaggcaaaatgccgcaaaaaagggaataagggcgacacggaaatgttgaatactcatactcttcctttttcaatattattgaagcatttatcagggttattgtctcatgagcggatacatatttgaatgtatttagaaaaataaacaaataggggttccgcgcacatttccccgaaaagtgccac

SEQ ID NO: 42 - DNA, 814 bp, Artificial Sequence
  Synthetic DNA
tgaggagacggtgaccagggtgccctggccccagtagtcaaagtagtaatcgtaagccactatatcctttcgcacagtaatatacggccgtgtcctcggctctcaggctgttcatttgcagatacagcgtgttcttggaattgtctctggagatggtgaaccggcccttcacggagtctgcgtagtatgttgctaccaccactaccactaatagctgagacccactccagccccttccctggagcctggcggacccagctcatggcatatgctgctaaaggtgaatccagaggctgcacaggagagtctcagggaccccccaggctgtaccaagcctcccccagactccaacagctgcacctcgtgcctggtgactcttccgcaatcagtcctgggacagaaacctcagggacagcctttatgagttttgatcacatctaacagagaggatgggccagtgaggagacggtgaccagggtgccctggccccagtagtcaaagtagtaatcgtgccactatatcctttcgcacagtaatatacggccgtgtcctcggctctcaggctgttcatttgcagatacagcgtgttcttggaattgtctctggagatggtgaaccggcccttcacggagtctgcgtagtatgtgctaccaccaaccactaatagctgagacccactccagccccttccctggagcctggcggacccagctcatggcatgctgctaaaggtgaatccagaggctgcacaggagagtctcagggaccccccaggctgtaccaagcctcccccagactccaacagctgcacctc

SEQ ID NO: 43 - DNA, 17606 bp, Artificial Sequence
  Targeting vector
  misc_feature (5946)..(5946): n is a, c, g, or t
gcgccctagcgcccgctcctttcgctttcttcccttcctttctcgccacgttcgccggctttccccgtcaagctctaaatcgggggctccctttagggttccgatttagtgctttacggcacctcgaccccaaaaaacttgattagggtgatggttcacgtagtgggccatcgccctgatagacggtttttcgccctttgacgttggagtccacgttctttaatagtggactcttgttccaaactggaacaacactcaaccctatctcggtctattcttttgatttataagggattttgccgatttcggcctattggttaaaaaatgagctgatttaacaaaaatttaacgcgaattttaacaaaatattaacgcttacaatttccattcgccattcaggctgcgcaactgttgggaagggcgatcgggtaccataagaatgcggccgcttcccgaagcgaaagccgcgtgttatttttgggtgggaaagccccgattcgctcctttttttttatttattatttttgttgtttttcgtgtctttttcttctccgttttgcagctgcggcctccaggtgtccccggccgtggtatttttgggtcgaaaaagccgctttttggctcacttggaaacctttcgggcgtctccaagcggagcgttggcgggaaatggtgttttttttgggttgttttcggtcccttttttcaccatttttgtggtttttcggcccattttcggcctcccccccccccccccccttcccgtggggctgcgctccgtggagcggaatggggtcgttaattaaggttaattggtttaattaatgggccgtgcagggagaagagggccgtgcggtggttgttagccctgattaatggcttggttgaggggagagtgtaattaagtgcttcgttagcactaattaatggcttgattgagaggagagtgtaattaaatgcttcataatccctaattaatggcttggttgagacaagagtgtaattaagtgcttcattagccctgattaatggcttggttgaggggagagtgtaattaaatgcttcgttagcactaattaatggcttgattgagaggagagtgtaattaaatgcttcataatccctaattaatggcttggttgagacaagagtgtaattaagtgcttcattagccctgattaatggcttggttgagaggagagtgtaattaaatgcttcattatccctaattagggactgaattccaaggagagtgtaattaagtgcttcattatccctaattaatggcttggttgagaggagagtgtaattaaatgctttgttagccctaattaatggtttgatggagaggagagtgtaattaagtgcttcattatccctaattaatggcttggttgaggggagagtgtaattaaatgcttagttagccctaattaatggcttggttgagaggagagtgtaattgaatgcttcattatccctaattagggattgaattgagaggagagtgtaattgaatgctttgttagccctaattagggattgaattgagaggagagtgtaattaaatgcctcattatccctaattagggattgaattgagaggagagtttaattaaatgcctcattatccctaattagggactgaattccgacgagagtgtaattaagtgcttcatttagccctaattaatggcttgattgagaggagagtgtaattaaatgcttcattatccctaattagggattgaattgagaggagagtgtaattaaatgcttcattatccctaattagggattgaattgagaggagagtgtaattaaatgcttcattatccctaattaatggcttggttgagaggggagtgtaattaagtgcttcgttatccctaattagggattgaattgtgaggagatggcaattaatacttcattatccctaattaatttaattagtccctattatccctaatttaattcatggtttggttgatggaagaatgtaattaaatgctttgttatccctaattaatggtttgattgagcggagagtgtaattaaatgcttcattatcccttattaatggttgtgtggaatgtagtgtaattagaagtccctaattaatggtttaattgagagaagactgcaattagatgactcatagcccctaataagtggtttaattatgagataatcacaattacatgtttcattgtccctaattaatcgtttaattgcgagaagatcacaattaattaaatgatccctaatttcaatttctgagaagtgtctttctcggaaattgagatatcataagaattcgcgatcaatttctgagaactgtcattctcggaatacctgacgtctgaggagacggtgaccagggtgccctggccccagtagtcaaagtagtaatcgtaagccactatatcctttcgcacagtaatatacggccgtgtcctcggctctcaggctgttcatttgcagatacagcgtgttcttggaattgtctctggagatggtgaaccggcccttcacggagtctgcgtagtatgttgctaccaccactaccactaatagctgagacccactccagccccttccctggagcctggcggacccagctcatggcatatgctgctaaaggtgaatccagaggctgcacaggagagtctcagggaccccccaggctgtaccaagcctcccccagactccaacagctgcacctcgtgcctggtgactcttccgcaatcagtcctgggacagaaacctcagggacagcctttatgagttttgatcacatctaacagagaggatgggccagtgaggagacggtgaccagggtgccctggccccagtagtcaaagtagtaatcgtgccactatatcctttcgcacagtaatatacggccgtgtcctcggctctcaggctgttcatttgcagatacagcgtgttcttggaattgtctctggagatggtgaaccggcccttcacggagtctgcgtagtatgtgctaccaccaaccactaatagctgagacccactccagccccttccctggagcctggcggacccagctcatggcatgctgctaaaggtgaatccagaggctgcacaggagagtctcagggaccccccaggctgtaccaagcctcccccagactccaacagctgcacctcgacgtcaatgttggcgcagaagggattcatatcaattaattccctgtcctcaattaatgcataattgggagtgcgatggaatcattcaataagtaatgaggacttggtgtcaaaatgccaattaagtaattaatgacacccaattaatacacaatggggattacagtggaataactcagtgaagttcatatctaaattgcaattgaataattaattacagctaattaatggatgggagactggcagtggtataacttaatgaaggaacacagtgaattcctgtctgaattgaaattaattgatttattagggctaattaatgaatggtggggttaaaaatagcattactcagcgaaggaacatgagttcatggctaaattgagattgaattattaattacaactaattgattaatgactgatgggagtaagaatggaataactcagtgaaggaacacaatggattcatggcctaattgaaattaaatggttaattagagctaattaatgaatgatggggggtggcaatggaatgatacaagaaagaaacacaatgggttcgtgtctacattgaaattaaataattaattacagctaattaataaacggcgaggttgacaatggtataactgtgaagagacagaatgagttcgtgactaaattggtattaaatgattaattagagctaattaacaggtggtggggctgagaatggcataactcaatgggggatgatgagctgatggcttaattggaattaataattaatcacaaccaattaacaggtgctgttaatggggttacaggggcatgacttcaggaagaagcacaaagtggccattaaataattaattgcacccaattaattcctgatggggattactgcagaggaactcagcgaaggattcaagcagaaatgacacagttaggttgctcaattgcgttaattaattaaaatcgctaattaggtgagcttcattaaggcctgatggggttcatcccaacgctgggatcaaagaactcagcgcagagtggataacgataattagaaggggacaaattaatgaggaaacacgactttgggcctagacggccattaaatcattaatcaacccgacgggcgcccaattaatcataaagttattaagcaattaagtcgaggctgacgagaaaccgcaacgagagccctccacgctcctttgagttggcgcaaacaacaaacaacgcgggctcgttaagcagcgacgacgccgagcgtaacgaagcaatccccgcgcccgacaattaacgcgctaacgaagccggagccctccttatgcaaattagcccctccagagggccataaaagcgccggctctccgacggcgcgggaggagcaccagtcggctccgcaaccatgagcccactcgtctcctccctcctgctcctggccgccctgccaggtgagggcgctgtggggctctatggggctctatggggtctcagcggggctctgcgggctcaatgggggccaaagggggggtctgcgggctctatgggggggtcaacggggggtctcacggggggccggctccgcgaggccgtgtggcggcggctccgtcagcgctctctgggcgcgcctccttccccacagggctgatggcggaggtgcagctgttggagtctgggggaggcttggtacagcctggggggtccctgagactctcctgtgcagcctctggattcacctttagcagctatgccatgagctgggtccgccaggctccagggaaggggctggagtgggtctcagctattagtggtagtggtggtagcacatactacgcagactccgtgaagggccggttcaccatctccagagacaattccaagaacacgctgtatctgcaaatgaacagcctgagagccgaggacacggccgtatattactgtgcgaaaggatatagtggctacgattactactttgactactggggccagggcaccctggtcaccgtctcctcaggtgagtcttcatatgaaccccccccaaaattgccgcggcgattttggggcaaaatcgggcgattttatggatcctgggtcagtcgaagggggcggtcggtccatcatttgcggccgggtgatttttggggccgaaaagtgggaatttggggcccaatttggggcccaatttggggcccaatttgggttttcgaggggggatttttttagggggagatttttgggtccccggaaaatggtgawtttgggtcaaaaatggggawtttgggggttckttttraggtggggttttttggggkagaaatggcggtctgaggggaaaatgtcgttttggggccattttgggccatttgaggggaaatttgggtcaaaaaatgacgattttgggtcgttttagggaggaaaatgaatttagggcgatttgagccaaatttgggtcaaaaatggcgattttgagtcaaaaaatgattattttgggtcattttagggaggaaaatgaatttagggagattggacggcaaatttgggtcaaaaaatggtgattttgggtcaaaaaatgattattttgggtcattttagggagaaaaatgaatttagggagatttgagggcaaatttgggtcaaaaaatggtgattttgggtcaaaaaatgattattttgggtcattttagggagaaaaatgaatttagggagatttgagggcaaatttgggtcgaaaaatggcgattttgggtgaaaaatggacaattttgggtcattttanggttaaaaatgaatttagggagattggacggcaaatttgggtcraaaaatggtgatttggggtsaaaaatgraywattttkggtcattttagggataaaaaatgaatttagggcgatgtgagccaattttgggtcaaaaatggcgattgtgagtcaaaaaatgattattttgggtcattttagggttaaaaatgaatttagggagattggacggcaaatttgggtcaaaaaatggtgattttcggtcaaaaaatgattattttgggtcattttagggagaaaaatgaatttagggagattggacggcaaatttgggtcgaaaaatggtgattttgggtcaaaaatggacaatttggggtcattttagggataaaaatgaatttagggagatttgagagcaaatttgggtctaaaaatgtcaatttggggtcaaaaatggtgattttgggtcattttagggatataaatgaattttgggagatttgagggcaaatttgggtcgaaaaatggtgatttggggtcaatttagggaggaaaatgaatttaaggtgatttgacggcaaatttgggttgaaaaatgacaatttggggtcattttaaagataaaatgaatttagggcgatttgagggcaaatttgggtcgaagaatggtgatttgggtcaaaaaatgacaattttgggtcattttagggatataaatggacttagagcgatttgagggcaaatttggttgaaaaaatggacaatttgggtcattttagggatataaatgaatttagggagatttgatggcaaatttgggtcgaaaaatggtgatttgggtcaaaaatggtgattttggttgaaaaacagtcatttggggtcattttagggattaaaatgaatttcgggagatttgagggcaaatttgggtcaaaaaatggtgattttgggtcaattagtgataaaaaaatgaatttagggtgatttgagggcaaatttgggtcaaaaaatgacaatttggggtttttttagggaggagaatgaatttagggagttttgagggcaaatttgggtcaaaaaatagtgatttgggtcaaaagtggtgattttggttgaaaaacagtcattttgggtcattttagggagaaaaatgaatttcgggagatttgagggcaaatttgggtcaaaaaatgacaattttgggtcactttacgaattaaaatgaatttagggagatttgagggcaaatttgggtcaaaatatggtgattttgggtcaatttagggaggaaaatgaatttagggcgatttgaaggcaaatttgggtcgaaaatggtgattttgggtcaaaaaatgatgattttgggtcgttttagggagaaaatgaatttagggagatttgagggcaaatttgggtcaaaaaatggtgattttgggtcattgtagggataaaaatgaatttggggcgatttgagggcaaatttgggtggaaaatggacaattttgggtcattttagggagaaaaatgaatttagggagatttgagggcaaatttgggtcaaaaaatggtgatttggggtcattttcagaagaaaaaatgattattttccccactaaaaatgtatattttggggccaaatggtgaaaaatggtgatttttaatcaaacgtccccaaaattggggaaatttcatcgatttgacccaaaattgagttttttttccctgttaaaaatgtacattttggggtcaatcgctgaaatgttcccacttttcacttctttgcccccaaattttgctgtccggtgagaaattaattaattaatgatcattaattgatcgacaattaatggttattaattaattaataggtcctcttttggtgactccttcgcttttggggccaaaagtccataaattggccccaaaaaattaacgctgagtaattggattccaaagtattaatgataaacattaaaagtgtttaattaataatgatattaaacataatttcgtttttattatcgatttatcaacaacgatgaacgataatactttacaacaatcgctaataattaattaattatttaattaattaatttctaataattacttcgcattatcggacacgagatgttgtaattattaataatttaattcctaataattagaagattcgttgaaaatggtacttatctttacaaataatcacttctaataataatgattaataatagttaataacaacaatgacgataatgacgataatattaataatatgtgatatatttaatataaaattcgtattaatatattatatctacaaaatatgatataaaatataatattttatttatatataacacaatttattattattatcattattatcattattaatatcatcattattaacgttatcgaaatacttatttagaaataataaaaacggatttaatgatggcaacaaaaatattttattaatgttaaaaaaaaataattaataatttccaaagattcgaattcggggcaacgaacggcactcgataatttttaattaattaatagtttgaattaatcggtactttttaatcctccattttgcccgaaatcgccgttttttgccccaaattccccaccgcggcgttaaaaacataaagaaattaagcatcaaaagtgcccttttttggggttgttttgacccaaaaaaaaaatggccgaattgggggcggccgttttacggttgggttcattttgggttcaaaacagccaaaaatgggaactttgggtttcgaaaacaacaacaacaaaaaaacgggtttattttgggctcattttgggtgtttttgggtcaggaggagaaaaaataggaagtttgagagcgaaacaacggccgcttttggggggaaaacggccctttttggtcaacggcgggggaaaaaaaaaagcggagtttttggggtgaaaaagagcggttttgggtaaatttgggttttggggtaaaagtggaggattttgggcaatgggagttaaaaaatgggtgtttttatgggggttcggtgcagtttttcctgtttgatggggggtttattaatccggggggggggattaatgagaattaataatgttaatagaaatatctgggaaattaatagcaattattaattgttaatagttattaatagttctatatatctcacatctacgatacaatataatatcgttacaatcatatagtcgatatattacatataattatcagtaataataataagtaacaataattagcagtaattaataataataattaatagtattcgttaataagattattgataataattaagtagtagcgattaatagagatgggatttcgtgagaaatggaccaaatttgggccgttttgacccaaatttttggtggttttttttccgattctttgtgaatttcgggtcggattcatcagcaattaattacggttattaggggctattagaggcttttaattgggattattagagacttttaagcggatttggggacttttaagtggattttatgattcttaagtggattttgggtggattttaccgcttttgggccgccgcccccctctaaccccccatctcccccccttttctctctccccccccccccccaaaccccacagcctccaccaagggcccatcggtcttccccctggcaccctcctccaagagcacctctgggggcacagcggccctgggctgcctggtcaaggactacttccccgaaccggtgacggtgtcgtggaactcaggcgccctgaccagcggcgtgcacaccttcccggctgtcctacagtcctcaggactctactccctcagcagcgtggtgaccgtgccctccagcagcttgggcacccagacctacatctgcaacgtgaatcacaagcccagcaacaccaaggtggacaagagagttgagcccaaatcttgtgacaaaactcacacatgcccaccgtgcccaggtaagtcactagaccagagctccactcccgggagaatggtaagtgctgtaaacatccctgcactagaggataagccatgtacagatccatttccatctctcctcatcagcacctgaactcctggggggaccgtcagtcttcctcttccccccaaaacccaaggacaccctcatgatctcccggacccctgaggtcacatgcgtggtggtggacgtgagccacgaagaccctgaggtcaagttcaactggtacgtggacggcgtggaggtgcataatgccaagacaaagccgcgggaggagcagtacaacagcacgtaccgtgtggtcagcgtcctcaccgtcctgcaccaggactggctgaatggcaaggagtacaagtgcaaggtctccaacaaagccctcccagcccccatcgagaaaaccatctccaaagccaaaggtgagagctgcagcctgactgcatgggggctgggatgggcataaggataaaggtctgtgtggacagccttctgcttcagccatgacctttgtgtatgtttctaccctcacagggcagccccgagaaccacaggtgtacaccctgcccccatcccgggaggagatgaccaagaaccaggtcagcctgacctgcctggtcaaaggcttctatcccagcgacatcgccgtggagtgggagagcaatgggcagccggagaacaactacaagaccacgcctcccgtgctggactccgacggctccttcttcctctatagcaagctcaccgtggacaagagcaggtggcagcaggggaacgtcttctcatgctccgtgatgcatgaggctctgcacaaccactacacgcagaagagcctctccctgtccccgggtaaatgagctcagcacccacaaaactctcaggtccaaagagacacccacactcatctccatgcttcccttgtataaataaagcacccagcaatgcctgggaccatgtaaaactgtcctggttctttccaaggtatagagcatagctcacaggctgatatttctggccagggttggaggacagccttgtctataggaagagaatgaggtttttgcactgcaggactcagagctcattagttatcctgccttggagtgttggggcttggctttaggcagtgccttttccttgccttcctacgaaccagcagctgccatacatagagataatcctaggaagcctcaaatggagaaggacacaaacccacctccctcaggctgttcctctatcccggccccacttctttacctaggggtttctctgagtctattgtggagttacacatggccaggggcattccagagacccttgtcatccatacactcaactcaggcagctttgcacaaacaaagtctgcacacccatacagatggctcactcttgcctgtgccatgtagggctgaggcacatggctcttgctgccccaagggagggactattagatagccacactcatgctgaatcctggcccattcaaattagcctgctgaacaccatccagtccatatagcacatgtatccacatgcacgtgtgcacaaaacgcatttaacacactgggacaacaattctgtgccctgcacagcacctatatccagcaatgtatcaccatacacacgaccaaaaattcaatgcccacgtttctgccatcacaaacagacacatctttcctctctgtggccactgcattatatgctcaacacaagacctctgaagccagatccatctctggcacctcggggtcatgcttcaaccccacatgaattatgcaaaccatagccataatggtctgaatcacttcacactgggatgttcccaagttcaggcaagacgagccacaggctctgctgatgactgaaggacagcaaagggtcagtccagctgtatagccactgttgacctgggtcacaggccctgctgaccctccaccttctcctgtactgaaggaatgaaagatgagacaagcatagagggcacttgaataatccaggtcactctgaggtccacccaaggcattattggactcaggtgggaagctgagactggtgtcccagagggaaaggaaggaaagcaggccccggggagggtctgctgtcccagtcaggctggagatctctcctctgaatccatgcagacatgtctgcctcacagggaatctctcccagcaccaaccatgttgggacaaacactgactgtcctctctgttcagagctgcaactggaggagagctgtgcggaggcgcaggacggggagctggacgggctgtggacgaccatcaccatcttcatcacactcttcctgttaagcgtgtgctacagtgccaccgtcaccttcttcaaggtgaagtggatcttctcctcggtggtggacctgaagcagaccatcatccccgactacaggaacatgatcggacagggggcctaggaattaattcgctgtctgcgagggccagctgttggggtgagtactccctctcaaaagcgggcatgacttctgcgctaagattgtcagtttccaaaaacgaggaggatttgatattcacctggcccgcggtgatgcctttgagggtggccgcgtccatctggtcagaaaagacaatctttttgttgtcaagcttgaggtgtggcaggcttgagatctggccatacacttgagtgacaatgacatccactttgcctttctctccacaggtgtccactcccaggtccaactgcaggtcgagcatgcatctagggcggccaattggatcctaccgttcgtataatgtatgctatacgaagttatcgtacgcttaattaactgatccggaattccgccccccccccccccccccctctccctcccccccccctaacgttactggccgaagccgcttggaataaggccggtgtgcgtttgtctatatgttattttccaccatattgccgtcttttggcaatgtgagggcccggaaacctggccctgtcttcttgacgagcattcctaggggtctttcccctctcgccaaaggaatgcaaggtctgttgaatgtcgtgaaggaagcagttcctctggaagcttcttgaagacaaacaacgtctgtagcgaccctttgcaggcagcggaaccccccacctggcgacaggtgcctctgcggccaaaagccacgtgtataagatacacctgcaaaggcggcacaaccccagtgccacgttgtgagttggatagttgtggaaagagtcaaatggctctcctcaagcgtattcaacaaggggctgaaggatgcccagaaggtaccccattgtatgggatctgatctggggcctcggtgcacatgctttacatgtgtttagtcgaggttaaaaaaacgtctaggccccccgaaccacggggacgtggttttcctttgaaaaacacgatgataagcttgccacaaccatggctgaacaagatggattgcacgcaggttctccggccgcttgggtggagaggctattcggctatgactgggcacaacagacaatcggctgctctgatgccgccgtgttccggctgtcagcgcaggggcgcccggttctttttgtcaagaccgacctgtccggtgccctgaatgaactgcaggacgaggcagcgcggctatcgtggctggccacgacgggcgttccttgcgcagctgtgctcgacgttgtcactgaagcgggaagggactggctgctattgggcgaagtgccggggcaggatctcctgtcatctcaccttgctcctgccgagaaagtatccatcatggctgatgcaatgcggcggctgcatacgcttgatccggctacctgcccattcgaccaccaagcgaaacatcgcatcgagcgagcacgtactcggatggaagccggtcttgtcgatcaggatgatctggacgaagagcatcaggggctcgcgccagccgaactgttcgccaggctcaaggcgcgcatgcccgacggcgaggatctcgtcgtgacccatggcgatgcctgcttgccgaatatcatggtggaaaatggccgcttttctggattcatcgactgtggccggctgggtgtggcggaccgctatcaggacatagcgttggctacccgtgatattgctgaagagcttggcggcgaatgggctgaccgcttcctcgtgctttacggtatcgccgctcccgattcgcagcgcatcgccttctatcgccttcttgacgagttcttctgaataacttcgtataatgtatgctatacgaacggtaggatcccgcccgccccacgacccgcagcgcccgaccgaaaggagcgcacgaccccatggctccgaccgaagccacccggggcggccccgccgaccccgcacccgcccccgaggcccaccgactctagataactgatcataatcagccataccacatttgtagaggttttacttgctttaaaaaacctcccacacctccccctgaacctgaaacataaaatgaatgcaattgttgttgttaacttgtttattgcagcttataatggttacaaataaagcaatagcatcacaaatttcacaaataaagcatttttttcactgtatgcaaaccacctcctggtgtcccccaacccttcatagccccccaccccgtctcggtcgcccacccaaccctccacattaaccccttcctccccacgctcgtcccccgattcccaccccccttttcgtcaccatgcaccccccgtcccgcgaggacttcgaaggccccttccgcaacgcctccatcctctgccagacccgcgggcgccgccgtcccgccgaggtcacgtggtacaaaaatggcagccccgtcgccgccgccgccgccaccaccgccaccaccgtcggccccgaagtggtggccgagagccgcatcagcgtcaccgaaagcgaatgggacaccggggccaccttcagctgcgtcgtggagggggagatgaggaacaccagcaagaggatggagtgcggatgtaagtggagggggggttttttggggggggatttggggggaaattgggggctttgggggcaaaaagtccgtcattttggtttggaaggggtcgatgtgggggaaaatgtgccaaaaatcccaattttgggggcactgaagtcgtaatttgaggtggaggaaggtagacagaaagagggtggagtgcggatgtaagtggagggggatttggggcagatttgggggaaattgggggtttggggggcaaataatccgtagtttcggtttggaaggggttgatgtggttttgtgctgaatttcgggggaaaaactgccaaaaatcccaattttgggggcattgaagtcatagtttgaggttggaaggaggtagagagcaagaggatgaagtgaggatgtaagtcgggggatttttggggcagatttgggggaaattgggggttttggggtcagagaatccgtaggtcgaccgcgccagcttttgttccctttagtgagggttaattgcgcgcttggcgtaatcatggtcatagctgtttcctgtgtgaaattgttatccgctcacaattccacacaacatacgagccggaagcataaagtgtaaagcctggggtgcctaatgagtgagctaactcacattaattgcgttgcgctcactgcccgctttccagtcgggaaacctgtcgtgccagctgcattaatgaatcggccaacgcgcggggagaggcggtttgcgtattgggcgctcttccgcttcctcgctcactgactcgctgcgctcggtcgttcggctgcggcgagcggtatcagctcactcaaaggcggtaatacggttatccacagaatcaggggataacgcaggaaagaacatgtgagcaaaaggccagcaaaaggccaggaaccgtaaaaaggccgcgttgctggcgtttttccataggctccgcccccctgacgagcatcacaaaaatcgacgctcaagtcagaggtggcgaaacccgacaggactataaagataccaggcgtttccccctggaagctccctcgtgcgctctcctgttccgaccctgccgcttaccggatacctgtccgcctttctcccttcgggaagcgtggcgctttctcatagctcacgctgtaggtatctcagttcggtgtaggtcgttcgctccaagctgggctgtgtgcacgaaccccccgttcagcccgaccgctgcgccttatccggtaactatcgtcttgagtccaacccggtaagacacgacttatcgccactggcagcagccactggtaacaggattagcagagcgaggtatgtaggcggtgctacagagttcttgaagtggtggcctaactacggctacactagaaggacagtatttggtatctgcgctctgctgaagccagttaccttcggaaaaagagttggtagctcttgatccggcaaacaaaccaccgctggtagcggtggtttttttgtttgcaagcagcagattacgcgcagaaaaaaaggatctcaagaagatcctttgatcttttctacggggtctgacgctcagtggaacgaaaactcacgttaagggattttggtcatgagattatcaaaaaggatcttcacctagatccttttaaattaaaaatgaagttttaaatcaatctaaagtatatatgagtaaacttggtctgacagttaccaatgcttaatcagtgaggcacctatctcagcgatctgtctatttcgttcatccatagttgcctgactccccgtcgtgtagataactacgatacgggagggcttaccatctggccccagtgctgcaatgataccgcgagacccacgctcaccggctccagatttatcagcaataaaccagccagccggaagggccgagcgcagaagtggtcctgcaactttatccgcctccatccagtctattaattgttgccgggaagctagagtaagtagttcgccagttaatagtttgcgcaacgttgttgccattgctacaggcatcgtggtgtcacgctcgtcgtttggtatggcttcattcagctccggttcccaacgatcaaggcgagttacatgatcccccatgttgtgcaaaaaagcggttagctccttcggtcctccgatcgttgtcagaagtaagttggccgcagtgttatcactcatggttatggcagcactgcataattctcttactgtcatgccatccgtaagatgcttttctgtgactggtgagtactcaaccaagtcattctgagaatagtgtatgcggcgaccgagttgctcttgcccggcgtcaatacgggataataccgcgccacatagcagaactttaaaagtgctcatcattggaaaacgttcttcggggcgaaaactctcaaggatcttaccgctgttgagatccagttcgatgtaacccactcgtgcacccaactgatcttcagcatcttttactttcaccagcgtttctgggtgagcaaaaacaggaaggcaaaatgccgcaaaaaagggaataagggcgacacggaaatgttgaatactcatactcttcctttttcaatattattgaagcatttatcagggttattgtctcatgagcggatacatatttgaatgtatttagaaaaataaacaaataggggttccgcgcacatttccccgaaaagtgccac

SEQ ID NO: 44 - DNA, 1032 bp, Bacteriophage P1
atgtccaatttactgaccgtacaccaaaatttgcctgcattaccggtcgatgcaacgagtgatgaggttcgcaagaacctgatggacatgttcagggatcgccaggcgttttctgagcatacctggaaaatgcttctgtccgtttgccggtcgtgggcggcatggtgcaagttgaataaccggaaatggtttcccgcagaacctgaagatgttcgcgattatcttctatatcttcaggcgcgcggtctggcagtaaaaactatccagcaacatttgggccagctaaacatgcttcatcgtcggtccgggctgccacgaccaagtgacagcaatgctgtttcactggttatgcggcggatccgaaaagaaaacgttgatgccggtgaacgtgcaaaacaggctctagcgttcgaacgcactgatttcgaccaggttcgttcactcatggaaaatagcgatcgctgccaggatatacgtaatctggcatttctggggattgcttataacaccctgttacgtatagccgaaattgccaggatcagggttaaagatatctcacgtactgacggtgggagaatgttaatccatattggcagaacgaaaacgctggttagcaccgcaggtgtagagaaggcacttagcctgggggtaactaaactggtcgagcgatggatttccgtctctggtgtagctgatgatccgaataactacctgttttgccgggtcagaaaaaatggtgttgccgcgccatctgccaccagccagctatcaactcgcgccctggaagggatttttgaagcaactcatcgattgatttacggcgctaaggatgactctggtcagagatacctggcctggtctggacacagtgcccgtgtcggagccgcgcgagatatggcccgcgctggagtttcaataccggagatcatgcaagctggtggctggaccaatgtaaatattgtcatgaactatatccgtaacctggatagtgaaacaggggcaatggtgcgcctgctggaagatggcgattag

SEQ ID NO: 45 - DNA, 5739 bp, Artificial Sequence
  Expression vector
tagttattaatagtaatcaattacggggtcattagttcatagcccatatatggagttccgcgttacataacttacggtaaatggcccgcctggctgaccgcccaacgacccccgcccattgacgtcaataatgacgtatgttcccatagtaacgccaatagggactttccattgacgtcaatgggtggagtatttacggtaaactgcccacttggcagtacatcaagtgtatcatatgccaagtacgccccctattgacgtcaatgacggtaaatggcccgcctggcattatgcccagtacatgaccttatgggactttcctacttggcagtacatctacgtattagtcatcgctattaccatggtgatgcggttttggcagtacatcaatgggcgtggatagcggtttgactcacggggatttccaagtctccaccccattgacgtcaatgggagtttgttttggcaccaaaatcaacgggactttccaaaatgtcgtaacaactccgccccattgacgcaaatgggcggtaggcgtgtacggtgggaggtctatataagcagagctggtttagtgaaccgtcagatccgctagcgctaccggtcgccaccatggtgagcaagggcgaggagctgttcaccggggtggtgcccatcctggtcgagctggacggcgacgtaaacggccacaagttcagcgtgtccggcgagggcgagggcgatgccacctacggcaagctgaccctgaagttcatctgcaccaccggcaagctgcccgtgccctggcccaccctcgtgaccaccctgacctacggcgtgcagtgcttcagccgctaccccgaccacatgaagcagcacgacttcttcaagtccgccatgcccgaaggctacgtccaggagcgcaccatcttcttcaaggacgacggcaactacaagacccgcgccgaggtgaagttcgagggcgacaccctggtgaaccgcatcgagctgaagggcatcgacttcaaggaggacggcaacatcctggggcacaagctggagtacaactacaacagccacaacgtctatatcatggccgacaagcagaagaacggcatcaaggtgaacttcaagatccgccacaacatcgaggacggcagcgtgcagctcgccgaccactaccagcagaacacccccatcggcgacggccccgtgctgctgcccgacaaccactacctgagcacccagtccgccctgagcaaagaccccaacgagaagcgcgatcacatggtcctgctggagttcgtgaccgccgccgggatcactctcggcatggacgagctgtacaagtccggactcagatctatgtccaatttactgaccgtacaccaaaatttgcctgcattaccggtcgatgcaacgagtgatgaggttcgcaagaacctgatggacatgttcagggatcgccaggcgttttctgagcatacctggaaaatgcttctgtccgtttgccggtcgtgggcggcatggtgcaagttgaataaccggaaatggtttcccgcagaacctgaagatgttcgcgattatcttctatatcttcaggcgcgcggtctggcagtaaaaactatccagcaacatttgggccagctaaacatgcttcatcgtcggtccgggctgccacgaccaagtgacagcaatgctgtttcactggttatgcggcggatccgaaaagaaaacgttgatgccggtgaacgtgcaaaacaggctctagcgttcgaacgcactgatttcgaccaggttcgttcactcatggaaaatagcgatcgctgccaggatatacgtaatctggcatttctggggattgcttataacaccctgttacgtatagccgaaattgccaggatcagggttaaagatatctcacgtactgacggtgggagaatgttaatccatattggcagaacgaaaacgctggttagcaccgcaggtgtagagaaggcacttagcctgggggtaactaaactggtcgagcgatggatttccgtctctggtgtagctgatgatccgaataactacctgttttgccgggtcagaaaaaatggtgttgccgcgccatctgccaccagccagctatcaactcgcgccctggaagggatttttgaagcaactcatcgattgatttacggcgctaaggatgactctggtcagagatacctggcctggtctggacacagtgcccgtgtcggagccgcgcgagatatggcccgcgctggagtttcaataccggagatcatgcaagctggtggctggaccaatgtaaatattgtcatgaactatatccgtaacctggatagtgaaacaggggcaatggtgcgcctgctggaagatggcgattaggtcgacggtaccgcgggcccgggatccaccggatctagataactgatcataatcagccataccacatttgtagaggttttacttgctttaaaaaacctcccacacctccccctgaacctgaaacataaaatgaatgcaattgttgttgttaacttgtttattgcagcttataatggttacaaataaagcaatagcatcacaaatttcacaaataaagcatttttttcactgcattctagttgtggtttgtccaaactcatcaatgtatcttaacgcgtaaattgtaagcgttaatattttgttaaaattcgcgttaaatttttgttaaatcagctcattttttaaccaataggccgaaatcggcaaaatcccttataaatcaaaagaatagaccgagatagggttgagtgttgttccagtttggaacaagagtccactattaaagaacgtggactccaacgtcaaagggcgaaaaaccgtctatcagggcgatggcccactacgtgaaccatcaccctaatcaagttttttggggtcgaggtgccgtaaagcactaaatcggaaccctaaagggagcccccgatttagagcttgacggggaaagccggcgaacgtggcgagaaaggaagggaagaaagcgaaaggagcgggcgctagggcgctggcaagtgtagcggtcacgctgcgcgtaaccaccacacccgccgcgcttaatgcgccgctacagggcgcgtcaggtggcacttttcggggaaatgtgcgcggaacccctatttgtttatttttctaaatacattcaaatatgtatccgctcatgagacaataaccctgataaatgcttcaataatattgaaaaaggaagagtcctgaggcggaaagaaccagctgtggaatgtgtgtcagttagggtgtggaaagtccccaggctccccagcaggcagaagtatgcaaagcatgcatctcaattagtcagcaaccaggtgtggaaagtccccaggctccccagcaggcagaagtatgcaaagcatgcatctcaattagtcagcaaccatagtcccgcccctaactccgcccatcccgcccctaactccgcccagttccgcccattctccgccccatggctgactaattttttttatttatgcagaggccgaggccgcctcggcctctgagctattccagaagtagtgaggaggcttttttggaggcctaggcttttgcaaagatcgatcaagagacaggatgaggatcgtttcgcatgattgaacaagatggattgcacgcaggttctccggccgcttgggtggagaggctattcggctatgactgggcacaacagacaatcggctgctctgatgccgccgtgttccggctgtcagcgcaggggcgcccggttctttttgtcaagaccgacctgtccggtgccctgaatgaactgcaagacgaggcagcgcggctatcgtggctggccacgacgggcgttccttgcgcagctgtgctcgacgttgtcactgaagcgggaagggactggctgctattgggcgaagtgccggggcaggatctcctgtcatctcaccttgctcctgccgagaaagtatccatcatggctgatgcaatgcggcggctgcatacgcttgatccggctacctgcccattcgaccaccaagcgaaacatcgcatcgagcgagcacgtactcggatggaagccggtcttgtcgatcaggatgatctggacgaagagcatcaggggctcgcgccagccgaactgttcgccaggctcaaggcgagcatgcccgacggcgaggatctcgtcgtgacccatggcgatgcctgcttgccgaatatcatggtggaaaatggccgcttttctggattcatcgactgtggccggctgggtgtggcggaccgctatcaggacatagcgttggctacccgtgatattgctgaagagcttggcggcgaatgggctgaccgcttcctcgtgctttacggtatcgccgctcccgattcgcagcgcatcgccttctatcgccttcttgacgagttcttctgagcgggactctggggttcgaaatgaccgaccaagcgacgcccaacctgccatcacgagatttcgattccaccgccgccttctatgaaaggttgggcttcggaatcgttttccgggacgccggctggatgatcctccagcgcggggatctcatgctggagttcttcgcccaccctagggggaggctaactgaaacacggaaggagacaataccggaaggaacccgcgctatgacggcaataaaaagacagaataaaacgcacggtgttgggtcgtttgttcataaacgcggggttcggtcccagggctggcactctgtcgataccccaccgagaccccattggggccaatacgcccgcgtttcttccttttccccaccccaccccccaagttcgggtgaaggcccagggctcgcagccaacgtcggggcggcaggccctgccatagcctcaggttactcatatatactttagattgatttaaaacttcatttttaatttaaaaggatctaggtgaagatcctttttgataatctcatgaccaaaatcccttaacgtgagttttcgttccactgagcgtcagaccccgtagaaaagatcaaaggatcttcttgagatcctttttttctgcgcgtaatctgctgcttgcaaacaaaaaaaccaccgctaccagcggtggtttgtttgccggatcaagagctaccaactctttttccgaaggtaactggcttcagcagagcgcagataccaaatactgtccttctagtgtagccgtagttaggccaccacttcaagaactctgtagcaccgcctacatacctcgctctgctaatcctgttaccagtggctgctgccagtggcgataagtcgtgtcttaccgggttggactcaagacgatagttaccggataaggcgcagcggtcgggctgaacggggggttcgtgcacacagcccagcttggagcgaacgacctacaccgaactgagatacctacagcgtgagctatgagaaagcgccacgcttcccgaagggagaaaggcggacaggtatccggtaagcggcagggtcggaacaggagagcgcacgagggagcttccagggggaaacgcctggtatctttatagtcctgtcgggtttcgccacctctgacttgagcgtcgatttttgtgatgctcgtcaggggggcggagcctatggaaaaacgccagcaacgcggcctttttacggttcctggccttttgctggccttttgctcacatgttctttcctgcgttatcccctgattctgtggataaccgtattaccgccatgcat

SEQ ID NO: 46 - DNA, 54 bp, Artificial Sequence
  Synthetic Primer
  misc_feature (26)..(35): n is a, g, c or t.
cgtatcgcctccctcgcgccatcagnnnnnnnnnncaggttccctggtgcaggc

SEQ ID NO: 47 - DNA, 44 bp, Artificial Sequence
  Synthetic Primer
ctatgcgccttgccagcccgctcaggcttggtccctccgccgaa

SEQ ID NO: 48 - DNA, 41 bp, Artificial Sequence
  Synthetic Primer
ctatgcgccttgccagcccgctcagtccgtcagcgctctct

SEQ ID NO: 49 - DNA, 54 bp, Artificial Sequence
  Synthetic Primer
  misc_feature (26)..(35): n is a, g, c or t.
cgtatcgcctccctcgcgccatcagnnnnnnnnnncggtgaccagggtgccctg

SEQ ID NO: 50 - DNA, 2503 bp, Homo sapiens
tcgccccctcgacacgagtgcgtacgctcgacaagacgcactccagtctgccctgactcagcctgcctccgtgtctgggtctcctggacagtcgatcaccatctcctgctctggaagcagctccaacatcggaagtaattatgtatactggtaccaacagcacccaggcaaagcccccaaactcatgatttataggaataatcagcggccctcaggggtttctaatcgcttctctggctccaagtctggcaacacggcctccctgaccatctctgggctccaggctgaggacgaggctgattattactgcgcagcatgggatgacagcctgagtggtcattgggtgttcggcggagggaccaagctgaccgtcctagcctgacacacacagccctccccagactgtgggatgaggccctgtgcccgcagtcacatgtggaatatcaagacacacacatctatgacaatcacagcactgtagatcagacacgatatcgcgagcagtctgccctgactcagcctgcctccgtgtctgggtctcctggacagtcgatcaccatctcctgctctggaagcagctccaacatcggaaataatgctgtaaactggtaccaacagcacccaggcaaagcccccaaactcatgatttattatgatgatctgctgccctcaggggtttctaatcgcttctctggctccaagtctggcaacacggcctccctgaccatctctgggctccaggctgaggacgaggctgattattactgcggaacatgggatggcagcctgaatggtgggaggctgttcggcggagggaccaagctgaccgtcctagcctgacacacacagccctccccagactgtgggatgaggccctgtgcccgcagtcacatgtggaatatcaagacacacacatctatgacaatcaccgtgtctctactcgcgtgtctctctatgcgctcgaggtcgacggtatcgataagcttgatatcgaattcctgcagcccgggggatcttacgctgtcttagtgtagattcgatcacgtcagtctgccctgactcagcctgcctccgtgtctgggtctcctggacagtcgatcaccatctcctgctctggagaagcattgccaaaaaaatatgcttattggtaccaacagcacccaggcaaagcccccaaactcatgatttataaagacagcgagaggccctcaggggtttctaatcgcttctctggctccaagtctggcaacacggcctccctgaccatctctgggctccaggctgaggacgaggctgattattactgcaactcttttacaagcaccaccaattatgtcttattcggcggagggaccaagctgaccgtcctagcctgacacacacagccctccccagactgtgggatgaggccctgtgcccgcagtcacatgtggaatatcaagacacacacatctatgacaatcactcgcactagttctagcgacttctatactatggatccactagacgtacagtcacgtactcagactacgctctacagtctgccctgactcagcctgcctccgtgtctgggtctcctggacagtcgatcaccatctcctgcaccctaagcagtgagcacagcacctacaccatcgaatggtaccaacagcacccaggcaaagcccccaaactcatgatttatgttaagagtgatggcagccacagcaagggggacggggtttctaatcgcttctctggctccaagtctggcaacacggcctccctgaccatctctgggctccaggctgaggacgaggctgattattactgcggagagagccacacgattgatggccaagtcggtgtggtattcggcggagggaccaagctgaccgtcctagcctgacacacacagccctccccagactgtgggatgaggccctgtgcccgcagtcacatgtggaatatcaagacacacacatctatgacaatcacctatagcgtatacgtcatcatagtcgcataactagacagtctgccctgactcagcctgcctccgtgtctgggtctcctggacagtcgatcaccatctcctgcactctgagcagtgggcacagtagctacatcatcgcatggtaccaacagcacccaggcaaagcccccaaactcatgatttatcttgaaggtagtggaagctacaacaaggggagcggggtttctaatcgcttctctggctccaagtctggcaacacggcctccctgaccatctctgggctccaggctgaggacgaggctgattattactgcgagacctgggacagtaacactcatgtggtattcggcggagggaccaagctgaccgtcctagcctgacacacacagccctccccagactgtgggatgaggccctgtgcccgcagtcacatgtggaatatcaagacacacacatctatgacaatcactatatatacatatgctagtatcacgcgagaactagttctagagcggccgccaccgccga

SEQ ID NO: 51 - DNA, 12801 bp, Artificial Sequence
  Targeting vector
agcgcccaatacgcaaaccgcctctccccgcgcgttggccgattcattaatgcagctggcacgacaggtttcccgactggaaagcgggcagtgagcgcaacgcaattaatgtgagttagctcactcattaggcaccccaggctttacactttatgcttccggctcgtatgttgtgtggaattgtgagcggataacaatttcacacaggaaacagctatgaccatgattacgccaagctcagaattaaccctcactaaagggactagtcctgcaggtttaaacgaattcgcccttgtcgacgggtatcacgtggggcaaatcgagagctaccattggctatggggaggagaaaatgaggcgtgctacttcctcgttcctgcagtgcgtgtcgaggtgccgtgttggtcggatctcagtggcagagcaggatggtgagcggtggccttggggccgctccctcactctgctgggctggtgcggtggctccgggaccggactttcagtggtgtttggtgtggtgctcactgtcctttggtgtcactgtgtggtgaattccctcagctgggcggtgagagcccatgctgtgtcctggtaggagtagtctgggctgcagtgcgggctctttgtgcgtgttgggggcggttccctggaagctaattctggaagaaatcccggctgcctctgtaacagttgttggcgatgtcaaacaccctggagctgctgactggctctgtaccattgagtgatgcagtttaaacctctctctttcctcctgctgtgtgtgaagctggtgttagtgctaggagacctgcacatccctcaccgatgcagtggtttaccagcaaagttcaagagcctcctggttccagggaagattcagcatattttgtgtacaggaaacctctgcaccaaggagagctatgactacctcaggactttggctggagatgttcacgttgttaagggggactctgaggtaatgttcttgctgctgtgaattcctcagtcctccatcttacaagccgtagttgtcccactgaaagctgggaaacccttcggtgtttgcaattcctgagcgctaatgtgtgggggaaggatgtaggaacaaataaggctcaagagacaacaacttcctaggctcctcttattgcccttgtggtaagggaggacttggtgtgtagtggtaatacatgcactcaacttattaagttctcatagctgctgtgaagctgctgcagtccctcagatccctgcaggaagaggggactgactgactgttgaatagccttgaagctcctgctctgcatgtggttccggtcaggctcaagatcccagttcttagctcttcagttgctcttctgggggtatagtactagcatctgggtcactgcagatggacagagactgtgcttgggtagcaaaaggcagacttacgttgtgaaaccttcattgtgttggtgaggttctttgatttctaccttgtgtatctctcttcctcagagtctgaattatcctgaacagaaggttgtaactgttgggcagttcagaattgggttgattcatggccatcaagtcattccctggggtgatgtggcaagcttggcattgctgcagaggcagctggatgtagacattcttatctcaggacatacacacagatttgaagcatttgagcatgaaaataagttctacatcaacccaggatcagctacaggagcctacactggtttacaaacgtgagtacaatgagccttgtgtttgtctttaagacagatgtctgtccttaagagtgcagcccatgtgttgaagagcactggtgagatgcagtgccatgcaggccatctctccctttcccagagaacacggcctacctctctctgttcataaggtcttggttaacttatgagttggccagcacagcctggcactgatgtgtcatgatcataaccctgagcccacgctctgctatgctgttgcttcttagagttgcattgccttgaggtgtattccagaagctgtgtgctgagctcttgttgggaaagaggccctcagggcactgccaacatctgaggcttgcaggagctggaacattcagccctgagggctgctctggccaactgcagctctgagtctgcagtcagtgcctctgagctgtgatgcttctcagataactgcagccctttgcaatgtaatgttttataatatatttccataggacatcttggtaagaggtgtaagctaatcagggtgattgacaaagtatgttttctttccaggaacgtcattccttcatttgtactgatggatatccaggcttccacagttgtgacttatgtataccagctaattgaggacgatgtgaaagtagaaagaattgagttcaagaaatactgacacgtgtttgaatctgcctgctgacttctcactgcctctcattctttctctcctagttaaagctgaatccggccacgtgggggtgctgctgcagcggcgtgtaactgtgagcttgggaagttctcaactagggcttagagcaggagaaactgattaacagaaattgccttattaaatgtatatatttcctgtgtctaagaacgaggtgctgttgttcctgacttgcggagctgcagctagtggtagcttggaatttaacctctcctgtaaaatgagcatagaataaaacagtattttcacatttctggatcctgttaattgtttgttaattaagaggacaggaattcagtgtcagggggctgctctttgcttcccaatgtgtaccactgaagcctctctggatttatcagagatactcaatggactcttaacagcactgtggcacctgacctcctgctgccttcagcctcccttcctggctggtgtgcttatgttgaggagctgtgggaggctggtgcagttctgtgggatgaggtaaggccagctgaatagcctgggggctggtcagggggcttagtgagaggagcagggctggggaatgttgtgaacagcaggtggtgccactgctattctgaggaaggaggcagcttctgcaaatgctttgcaatgcaggatgacaaagtgcttctgctagccctagtcaatttctgagaactgtcattctcggaatacctcgatcgataacttcgtataatgtatactatacgaagttattttatttgtgaaatttgtgatgctattgctttatttgtaaccattataagctgcaataaacaagttggggtgggcgaagaactccagcatgagatccccgcgctggaggatcatccagccggcgtcccggaaaacgattccgaagcccaacctttcatagaaggcggcggtggaatcgaaatctcgtgatggcaggttgggcgtcgcttggtcggtcatttcgaaccccagagtcccgctcagaagaactcgtcaagaaggcgatagaaggcgatgcgctgcgaatcgggagcggcgataccgtaaagcacgaggaagcggtcagcccattcgccgccaagctcttcagcaatatcacgggtagccaacgctatgtcctgatagcggtccgccacacccagccggccacagtcgatgaatccagaaaagcggccattttccaccatgatattcggcaagcaggcatcgccatgggtcacgacgagatcctcgccgtcgggcatgcgcgccttgagcctggcgaacagttcggctggcgcgagcccctgatgctcttcgtccagatcatcctgatcgacaagaccggcttccatccgagtacgtgctcgctcgatgcgatgtttcgcttggtggtcgaatgggcaggtagccggatcaagcgtatgcagccgccgcattgcatcagccatgatggatactttctcggcaggagcaaggtgagatgacaggagatcctgccccggcacttcgcccaatagcagccagtcccttcccgcttcagtgacaacgtcgagcacagctgcgcaaggaacgcccgtcgtggccagccacgatagccgcgctgcctcgtcctgcagttcattcagggcaccggacaggtcggtcttgacaaaaagaaccgggcgcccctgcgctgacagccggaacacggcggcatcagagcagccgattgtctgttgtgcccagtcatagccgaatagcctctccacccaagcggccggagaacctgcgtgcaatccatcttgttcaatcatgcgaaacgatcctcatcctgtctcttgatcagatccgaaaatggatatacaagctcccgggagctttttgcaaaagcctaggcctccaaaaaagcctcctcactacttctggaatagctcagaggcagaggcggcctcggcctctgcataaataaaaaaaattagtcagccatggggcggagaatgggcggaactgggcggagttaggggcgggatgggcggagttaggggcgggactatggttgctgactaattgagatgcatgctttgcatacttctgcctgctggggagcctggggactttccacacctggttgctgactaattgagatgcatgctttgcatacttctgcctgctggggagcctggggactttccacaccctaaataacttcgtataatgtatactatacgaagttatctcgtgtccgataactgtaattatcggaccgtcaatcgattcgccccctcgacacgagtgcgtacgctcgacaagacgcactccagtctgccctgactcagcctgcctccgtgtctgggtctcctggacagtcgatcaccatctcctgctctggaagcagctccaacatcggaagtaattatgtatactggtaccaacagcacccaggcaaagcccccaaactcatgatttataggaataatcagcggccctcaggggtttctaatcgcttctctggctccaagtctggcaacacggcctccctgaccatctctgggctccaggctgaggacgaggctgattattactgcgcagcatgggatgacagcctgagtggtcattgggtgttcggcggagggaccaagctgaccgtcctagcctgacacacacagccctccccagactgtgggatgaggccctgtgcccgcagtcacatgtggaatatcaagacacacacatctatgacaatcacagcactgtagatcagacacgatatcgcgagcagtctgccctgactcagcctgcctccgtgtctgggtctcctggacagtcgatcaccatctcctgctctggaagcagctccaacatcggaaataatgctgtaaactggtaccaacagcacccaggcaaagcccccaaactcatgatttattatgatgatctgctgccctcaggggtttctaatcgcttctctggctccaagtctggcaacacggcctccctgaccatctctgggctccaggctgaggacgaggctgattattactgcggaacatgggatggcagcctgaatggtgggaggctgttcggcggagggaccaagctgaccgtcctagcctgacacacacagccctccccagactgtgggatgaggccctgtgcccgcagtcacatgtggaatatcaagacacacacatctatgacaatcaccgtgtctctactcgcgtgtctctctatgcgctcgaggtcgacggtatcgataagcttgatatcgaattcctgcagcccgggggatcttacgctgtcttagtgtagattcgatcacgtcagtctgccctgactcagcctgcctccgtgtctgggtctcctggacagtcgatcaccatctcctgctctggagaagcattgccaaaaaaatatgcttattggtaccaacagcacccaggcaaagcccccaaactcatgatttataaagacagcgagaggccctcaggggtttctaatcgcttctctggctccaagtctggcaacacggcctccctgaccatctctgggctccaggctgaggacgaggctgattattactgcaactcttttacaagcaccaccaattatgtcttattcggcggagggaccaagctgaccgtcctagcctgacacacacagccctccccagactgtgggatgaggccctgtgcccgcagtcacatgtggaatatcaagacacacacatctatgacaatcactcgcactagttctagcgacttctatactatggatccactagacgtacagtcacgtactcagactacgctctacagtctgccctgactcagcctgcctccgtgtctgggtctcctggacagtcgatcaccatctcctgcaccctaagcagtgagcacagcacctacaccatcgaatggtaccaacagcacccaggcaaagcccccaaactcatgatttatgttaagagtgatggcagccacagcaagggggacggggtttctaatcgcttctctggctccaagtctggcaacacggcctccctgaccatctctgggctccaggctgaggacgaggctgattattactgcggagagagccacacgattgatggccaagtcggtgtggtattcggcggagggaccaagctgaccgtcctagcctgacacacacagccctccccagactgtgggatgaggccctgtgcccgcagtcacatgtggaatatcaagacacacacatctatgacaatcacctatagcgtatacgtcatcatagtcgcataactagacagtctgccctgactcagcctgcctccgtgtctgggtctcctggacagtcgatcaccatctcctgcactctgagcagtgggcacagtagctacatcatcgcatggtaccaacagcacccaggcaaagcccccaaactcatgatttatcttgaaggtagtggaagctacaacaaggggagcggggtttctaatcgcttctctggctccaagtctggcaacacggcctccctgaccatctctgggctccaggctgaggacgaggctgattattactgcgagacctgggacagtaacactcatgtggtattcggcggagggaccaagctgaccgtcctagcctgacacacacagccctccccagactgtgggatgaggccctgtgcccgcagtcacatgtggaatatcaagacacacacatctatgacaatcactatatatacatatgctagtatcacgcgagaactagttctagagcggccgccaccgccgaggcgcgccatattgcctccctgtgttgctgttgcagggttgcttctgcctcatactggtttctcccttctggaggtggccaaaagccgggccctgtgcaaccctggtgcataaataccttatggcccctaagtagggcaggtgtgggacacgctctggcacctggggtgtgtgcaagtgctcaggaagacctgcaggcacaggtggcagtgggggtctctggctgtgctcgagcagcagctgcctggggtaagggtagtactctgtgcatgaacaatgctgcagggctcagctctgctcagaccacgaccctggcaccaacagagacctgcctggctctgtggtcatgtaaacctttacaggagctcaagacaaggctgtttattactgctctggcaggaaagaagcactggccatggtcatagagagttccagcaacaggaaagtgagagcccaagctgctgaggtaccagggctcctcaggtgcctgctgcagcagcttggacacagtcgaggaacagcaattgtacctgtgtggtggatcaggctgtgctgcctgtgaacctattctagcacatctgtcacctctgtgccactcacagggataccacccctgagacccctaccccatcagcctctgtgtgggatatggtgttgggcccaagggctctgttgcacagggagatagaggcctggggaggagggaaagcattgaggtggtgttgataccagggatgtgagcccaagcaagagatcagcagagcaaggaggaagaattgcaggtgttggggctggggaaagccccagatggctggagctggtggggccactggagatctcctcctcccatcctgctccatgctggggcagctgctgcaggctgaccagggcctgcccgggcacgttgtgaaggtcaccaaggatggagacttcagagctatctgggacacgtgttttaacgtttgatcagccttgcagcaaaacagtgttttgctctattgaacagtgttcaacaaaaacgatcagtggcctggaacacatctcctacgaagaaaggttgcgagagctgggtctggagaagagaaggctctggggcaacctccctgtggcctgtcagtgcttaaaggaggctcaagagaaagatggagagagactttatacacggagctgtagcaatatgacaaggagaaatggtttaaaatggaaagagggtagatttaggttagctatcaagaagaaattcttcactcagaggtgatgaagcactgtagcaggttgcccagagaagtattggatgcttccttcctggcagggcccaaggccagactggatgggttctgggcagcctgttctggtgggagatgtccctgcctgtggcatggcttggaaatgggtagcctttgaggtccctctcagcccaaatcattctatgttcttgtggttccctgcatttcagcctttgcctgttgactctggtgccactgttggacaattctactcagctgcgtttcatccctgccccaaagcagtaatcccatggataagcaatgctctgaggccttcaccaccctcagggctcctgctgaccctagcggcctccctggcagcatgagccctttgttgtccgcactgctgctgccgagggtcctgccagccccccagggccttttctgcccaggcactgccacctgctaaaacccagcctgcccatggcagggcatcgcatgtctgagggatggaacggggcaagggcagtgctgcaggcagtggttcaagaaacgtttagatgttgtactgagggatgtggtttagtgggaaatactggtgataggtggatggttggactggaggatcttagaggtcttttccaaccttggtgattatgtgattctatgaagggagccatagcctgctcccatcatgccccgccagtccggctctcccgagcactttggttccgcagcatgcggccgcaagggcgaattcgcggccgctaaattcaattcgccctatagtgagtcgtattacaattcactggccgtcgttttacaacgtcgtgactgggaaaaccctggcgttacccaacttaatcgccttgcagcacatccccctttcgccagctggcgtaatagcgaagaggcccgcaccgatcgcccttcccaacagttgcgcagcctatacgtacggcagtttaaggtttacacctataaaagagagagccgttatcgtctgtttgtggatgtacagagtgatattattgacacgccggggcgacggatggtgatccccctggccagtgcacgtctgctgtcagataaagtctcccgtgaactttacccggtggtgcatatcggggatgaaagctggcgcatgatgaccaccgatatggccagtgtgccggtctccgttatcggggaagaagtggctgatctcagccaccgcgaaaatgacatcaaaaacgccattaacctgatgttctggggaatataaatgtcaggcatgagattatcaaaaaggatcttcacctagatccttttcacgtagaaagccagtccgcagaaacggtgctgaccccggatgaatgtcagctactgggctatctggacaagggaaaacgcaagcgcaaagagaaagcaggtagcttgcagtgggcttacatggcgatagctagactgggcggttttatggacagcaagcgaaccggaattgccagctggggcgccctctggtaaggttgggaagccctgcaaagtaaactggatggctttcttgccgccaaggatctgatggcgcaggggatcaagctctgatcaagagacaggatgaggatcgtttcgcatgattgaacaagatggattgcacgcaggttctccggccgcttgggtggagaggctattcggctatgactgggcacaacagacaatcggctgctctgatgccgccgtgttccggctgtcagcgcaggggcgcccggttctttttgtcaagaccgacctgtccggtgccctgaatgaactgcaagacgaggcagcgcggctatcgtggctggccacgacgggcgttccttgcgcagctgtgctcgacgttgtcactgaagcgggaagggactggctgctattgggcgaagtgccggggcaggatctcctgtcatctcaccttgctcctgccgagaaagtatccatcatggctgatgcaatgcggcggctgcatacgcttgatccggctacctgcccattcgaccaccaagcgaaacatcgcatcgagcgagcacgtactcggatggaagccggtcttgtcgatcaggatgatctggacgaagagcatcaggggctcgcgccagccgaactgttcgccaggctcaaggcgagcatgcccgacggcgaggatctcgtcgtgacccatggcgatgcctgcttgccgaatatcatggtggaaaatggccgcttttctggattcatcgactgtggccggctgggtgtggcggaccgctatcaggacatagcgttggctacccgtgatattgctgaagagcttggcggcgaatgggctgaccgcttcctcgtgctttacggtatcgccgctcccgattcgcagcgcatcgccttctatcgccttcttgacgagttcttctgaattattaacgcttacaatttcctgatgcggtattttctccttacgcatctgtgcggtatttcacaccgcatcaggtggcacttttcggggaaatgtgcgcggaacccctatttgtttatttttctaaatacattcaaatatgtatccgctcatgagattatcaaaaaggatcttcacctagatccttttaaattaaaaatgaagttttaaatcaatctaaagtatatatgagtaaacttggtctgacagttaccaatgcttaatcagtgaggcacctatctcagcgatctgtctatttcgttcatccatagttgcctgactccccgtcgtgtagataactacgatacgggagggcttaccatctggccccagtgctgcaatgataccgcgagacccacgctcaccggctccagatttatcagcaataaaccagccagccggaagggccgagcgcagaagtggtcctgcaactttatccgcctccatccagtctattaattgttgccgggaagctagagtaagtagttcgccagttaatagtttgcgcaacgttgttgccattgctacaggcatcgtggtgtcacgctcgtcgtttggtatggcttcattcagctccggttcccaacgatcaaggcgagttacatgatcccccatgttgtgcaaaaaagcggttagctccttcggtcctccgatcgttgtcagaagtaagttggccgcagtgttatcactcatggttatggcagcactgcataattctcttactgtcatgccatccgtaagatgcttttctgtgactggtgagtactcaaccaagtcattctgagaatagtgtatgcggcgaccgagttgctcttgcccggcgtcaatacgggataataccgcgccacatagcagaactttaaaagtgctcatcattggaaaacgttcttcggggcgaaaactctcaaggatcttaccgctgttgagatccagttcgatgtaacccactcgtgcacccaactgatcttcagcatcttttactttcaccagcgtttctgggtgagcaaaaacaggaaggcaaaatgccgcaaaaaagggaataagggcgacacggaaatgttgaatactcatactcttcctttttcaatattattgaagcatttatcagggttattgtctcatgaccaaaatcccttaacgtgagttttcgttccactgagcgtcagaccccgtagaaaagatcaaaggatcttcttgagatcctttttttctgcgcgtaatctgctgcttgcaaacaaaaaaaccaccgctaccagcggtggtttgtttgccggatcaagagctaccaactctttttccgaaggtaactggcttcagcagagcgcagataccaaatactgttcttctagtgtagccgtagttaggccaccacttcaagaactctgtagcaccgcctacatacctcgctctgctaatcctgttaccagtggctgctgccagtggcgataagtcgtgtcttaccgggttggactcaagacgatagttaccggataaggcgcagcggtcgggctgaacggggggttcgtgcacacagcccagcttggagcgaacgacctacaccgaactgagatacctacagcgtgagctatgagaaagcgccacgcttcccgaagggagaaaggcggacaggtatccggtaagcggcagggtcggaacaggagagcgcacgagggagcttccagggggaaacgcctggtatctttatagtcctgtcgggtttcgccacctctgacttgagcgtcgatttttgtgatgctcgtcaggggggcggagcctatggaaaaacgccagcaacgcggcctttttacggttcctggccttttgctggccttttgctcacatgttctttcctgcgttatcccctgattctgtggataaccgtattaccgcctttgagtgagctgataccgctcgccgcagccgaacgaccgagcgcagcgagtcagtgagcgaggaagcggaag

SEQ ID NO: 52 - DNA, 13120 bp, Artificial Sequence
  Targeting vector
cacctgacgcgccctgtagcggcgcattaagcgcggcgggtgtggtggttacgcgcagcgtgaccgctacacttgccagcgccctagcgcccgctcctttcgctttcttcccttcctttctcgccacgttcgccggctttccccgtcaagctctaaatcgggggctccctttagggttccgatttagtgctttacggcacctcgaccccaaaaaacttgattagggtgatggttcacgtagtgggccatcgccctgatagacggtttttcgccctttgacgttggagtccacgttctttaatagtggactcttgttccaaactggaacaacactcaaccctatctcggtctattcttttgatttataagggattttgccgatttcggcctattggttaaaaaatgagctgatttaacaaaaatttaacgcgaattttaacaaaatattaacgcttacaatttccattcgccattcaggctgcgcaactgttgggaagggcgatcggtgcgggcctcttcgctattacgccagctggcgaaagggggatgtgctgcaaggcgattaagttgggtaacgccagggttttcccagtcacgacgttgtaaaacgacggccagtgagcgcgcgtaatacgactcactatagggcgaattggctgggtcagtcgaagggggcggtcggtccatcatttgcggccgggtgatttttggggccgaaaagtgggaatttggggcccaatttggggcccaatttggggcccaatttgggttttcgaggggggatttttttagggggagattttgggtccccggaaaatggtgattttgggtcaaaaatggggattttggggtcgttttgaggtggggttttttggggtagaaatggcggtctgaggggaaaatgtcgttttggggccattttgggccatttgaggggaaatttgggtcaaaaaatgacgattttgggtcgttttagggaggaaaatgaatttagggcgatttgagccaaatttgggtcaaaaatggcgattttgagtcaaaaaatgattattttgggtcattttagggaggaaaatgaatttagggagattggacggcaaatttgggtcaaaaaatggtgattttgggtcaaaaaatgattattttgggtcattttagggagaaaaatgaatttagggagatttgagggcaaatttgggtcaaaaaatggtgattttgggtcaaaaaatgattattttgggtcattttagggagaaaaatgaatttagggagatttgagggcaaatttgggtcgaaaaatggcgattttgggtgaaaaatggacaattttgggtcattttagggttaaaaatgaatttagggagattggacggcaaatttgggtcaaaaaatggtgatttggggtcaaaaaataattattttgggtcattttagggataaaaaatgaatttagggagatttgagggcaaatttgggtcgaaaaatggtgatttggggtgaaaaatggacaattttgggtcattttagggataaaaaatgaatttagggcgatttgagccaaatttgggtcaaaaatggcgattttgagtcaaaaaatgattattttgggtcattttagggttaaaaatgaatttagggagattggacggcaaatttgggtcaaaaaatggtgattttcggtcaaaaaatgattattttgggtcattttagggagaaaaatgaatttagggagattggacggcaaatttgggtcgaaaaatggtgattttgggtcaaaaatggacaatttggggtcattttagggataaaaatgaatttagggagatttgagagcaaatttgggtctaaaaatgtcaatttggggtcaaaaatggtgattttgggtcattttagggatataaatgaattttgggagatttgagggcaaatttgggtcgaaaaatggtgatttggggtcaatttagggaggaaaatgaatttaaggtgatttgacggcaaatttgggttgaaaaatgacaatttggggtcattttaaagataaaatgaatttagggcgatttgagggcaaatttgggtcgaaaaatggtgatttgggtcaaaaaatgacaattttgggtcattttagggatataaatggacttagagcgatttgagggcaaatttggttgaaaaaatggacaatttgggtcattttagggatataaatgaatttagggagatttgatggcaaatttgggtcgaaaaatggtgatttgggtcaaaaatggtgattttggttgaaaaacagtcatttggggtcattttagggattaaaatgaatttcgggagatttgagggcaaatttgggtcaaaaaatggtgattttgggtcaattagtgataaaaaaatgaatttagggtgatttgagggcaaatttgggtcaaaaaatgacaatttggggtttttttagggaggagaatgaatttagggagttttgagggcaaatttgggtcaaaaaatagtgatttgggtcaaaagtggtgattttggttgaaaaacagtcattttgggtcattttagggagaaaaatgaatttcgggagatttgagggcaaatttgggtcaaaaaatgacaattttgggtcactttacgaattaaaatgaatttagggagatttgagggcaaatttgggtcaaaatatggtgattttgggtcaatttagggaggaaaatgaatttagggcgatttgaaggcaaatttgggtcgaaaatggtgattttgggtcaaaaaatgatgattttgggtcgttttagggagaaaatgaatttagggagatttgagggcaaatttgggtcaaaaaatggtgattttgggtcattgtagggataaaaatgaatttggggcgatttgagggcaaatttgggtggaaaatggacaattttgggtcattttagggagaaaaatgaatttagggagatttgagggcaaatttgggtcaaaaaatggtgatttggggtcattttcagaagaaaaaatgattattttccccactaaaaatgtatattttggggccaaatggtgaaaaatggtgatttttaatcaaacgtccccaaaattggggaaatttcatcgatttgacccaaaattgagttttttttccctgttaaaaatgtacattttggggtcaatcgctgaaatgttcccacttttcacttctttgcccccaaattttgctgtccggtgagaaattaattaattaatgatcattaattgatcgacaattaatggttattaattaattaataggtcctcttttggtgactccttcgcttttggggccaaaagtccataaattggccccaaaaaattaacgctgagtaattggattccaaagtattaatgataaacattaaaagtgtttaattaataatgatattaaacataatttcgtttttattatcgatttatcaacaacgatgaacgataatactttacaacaatcgctaataattaattaattatttaattaattaatttctaataattacttcgcattatcggacacgagatgttgtaattattaataatttaattcctaataattagaagattcgttgaaaatggtacttatctttacaaataatcacttctaataataatgattaataatagttaataacaacaatgacgataatgacgataatattaataatatgtgatatatttaatataaaattcgtattaatatattatatctacaaaatatgatataaaatataatattttatttatatataacacaatttattattattatcattattatcattattaatatcatcattattaacgttatcgaaatacttatttagaaataataaaaacggatttaatgatggcaacaaaaatattttattaatgttaaaaaaaaataattaataatttccaaagattcgaattcggggcaacgaacggcactcgataatttttaattaattaatagtttgaattaatcggtactttttaatcctccattttgcccgaaatcgccgttttttgccccaaattccccaccgcggcgttaaaaacataaagaaattaagcatcaaaagtgcccttttttggggttgttttgacccaaaaaaaaaatggccgaattgggggcggccgttttacggttgggttcattttgggttcaaaacagccaaaaatgggaactttgggtttcgaaaacaacaacaacaaaaaaacgggtttattttgggctcattttgggtgtttttgggtcaggaggagaaaaaataggaagtttgagagcgaaacaacggccgcttttggggggaaaacggccctttttggtcaacggcgggggaaaaaaaaaagcggagtttttggggtgaaaaagagcggttttgggtaaatttgggttttggggtaaaagtggaggattttgggcaatgggagttaaaaaatgggtgtttttatgggggttcggtgcagtttttcctgtttgatggggggtttattaatccggggggggggattaatgagaattaataatgttaatagaaatatctgggaaattaatagcaattattaattgttaatagttattaatagttctatatatctcacatctacgatacaatataatatcgttacaatcatatagtcgatatattacatataattatcagtaataataataagtaacaataattagcagtaattaataataataattaatagtattcgttaataagattattgataataattaagtagtagcgattaatagagatgggatttcgtgagaaatggaccaaatttgggccgttttgacccaaatttttggtggttttttttccgattctttgtgaatttcgggtcggattcatcagcaattaattacggttattaggggctattagaggcttttaattgggattattagagacttttaagcggatttggggacttttaagtggattttatgattcttaagtggattttgggtggattttaccgcttttggacgtacgatcgggtaccataagaatgcggccgccgcccccctctaaccccccatctcccccccttttctctctccccccccccccccaaaccccacagcctccaccaagggcccatcggtcttccccctggcaccctcctccaagagcacctctgggggcacagcggccctgggctgcctggtcaaggactacttccccgaaccggtgacggtgtcgtggaactcaggcgccctgaccagcggcgtgcacaccttcccggctgtcctacagtcctcaggactctactccctcagcagcgtggtgaccgtgccctccagcagcttgggcacccagacctacatctgcaacgtgaatcacaagcccagcaacaccaaggtggacaagagagttgagcccaaatcttgtgacaaaactcacacatgcccaccgtgcccaggtaagtcactagaccagagctccactcccgggagaatggtaagtgctgtaaacatccctgcactagaggataagccatgtacagatccatttccatctctcctcatcagcacctgaactcctggggggaccgtcagtcttcctcttccccccaaaacccaaggacaccctcatgatctcccggacccctgaggtcacatgcgtggtggtggacgtgagccacgaagaccctgaggtcaagttcaactggtacgtggacggcgtggaggtgcataatgccaagacaaagccgcgggaggagcagtacaacagcacgtaccgtgtggtcagcgtcctcaccgtcctgcaccaggactggctgaatggcaaggagtacaagtgcaaggtctccaacaaagccctcccagcccccatcgagaaaaccatctccaaagccaaaggtgagagctgcagcctgactgcatgggggctgggatgggcataaggataaaggtctgtgtggacagccttctgcttcagccatgacctttgtgtatgtttctaccctcacagggcagccccgagaaccacaggtgtacaccctgcccccatcccgggaggagatgaccaagaaccaggtcagcctgacctgcctggtcaaaggcttctatcccagcgacatcgccgtggagtgggagagcaatgggcagccggagaacaactacaagaccacgcctcccgtgctggactccgacggctccttcttcctctatagcaagctcaccgtggacaagagcaggtggcagcaggggaacgtcttctcatgctccgtgatgcatgaggctctgcacaaccactacacgcagaagagcctctccctgtccccgggtaaatgagctcagcacccacaaaactctcaggtccaaagagacacccacactcatctccatgcttcccttgtataaataaagcacccagcaatgcctgggaccatgtaaaactgtcctggttctttccaaggtatagagcatagctcacaggctgatatttctggccagggttggaggacagccttgtctataggaagagaatgaggtttttgcactgcaggactcagagctcattagttatcctgccttggagtgttggggcttggctttaggcagtgccttttccttgccttcctacgaaccagcagctgccatacatagagataatcctaggaagcctcaaatggagaaggacacaaacccacctccctcaggctgttcctctatcccggccccacttctttacctaggggtttctctgagtctattgtggagttacacatggccaggggcattccagagacccttgtcatccatacactcaactcaggcagctttgcacaaacaaagtctgcacacccatacagatggctcactcttgcctgtgccatgtagggctgaggcacatggctcttgctgccccaagggagggactattagatagccacactcatgctgaatcctggcccattcaaattagcctgctgaacaccatccagtccatatagcacatgtatccacatgcacgtgtgcacaaaacgcatttaacacactgggacaacaattctgtgccctgcacagcacctatatccagcaatgtatcaccatacacacgaccaaaaattcaatgcccacgtttctgccatcacaaacagacacatctttcctctctgtggccactgcattatatgctcaacacaagacctctgaagccagatccatctctggcacctcggggtcatgcttcaaccccacatgaattatgcaaaccatagccataatggtctgaatcacttcacactgggatgttcccaagttcaggcaagacgagccacaggctctgctgatgactgaaggacagcaaagggtcagtccagctgtatagccactgttgacctgggtcacaggccctgctgaccctccaccttctcctgtactgaaggaatgaaagatgagacaagcatagagggcacttgaataatccaggtcactctgaggtccacccaaggcattattggactcaggtgggaagctgagactggtgtcccagagggaaaggaaggaaagcaggccccggggagggtctgctgtcccagtcaggctggagatctctcctctgaatccatgcagacatgtctgcctcacagggaatctctcccagcaccaaccatgttgggacaaacactgactgtcctctctgttcagagctgcaactggaggagagctgtgcggaggcgcaggacggggagctggacgggctgtggacgaccatcaccatcttcatcacactcttcctgttaagcgtgtgctacagtgccaccgtcaccttcttcaaggtgaagtggatcttctcctcggtggtggacctgaagcagaccatcatccccgactacaggaacatgatcggacagggggcctaggaattaattcgctgtctgcgagggccagctgttggggtgagtactccctctcaaaagcgggcatgacttctgcgctaagattgtcagtttccaaaaacgaggaggatttgatattcacctggcccgcggtgatgcctttgagggtggccgcgtccatctggtcagaaaagacaatctttttgttgtcaagcttgaggtgtggcaggcttgagatctggccatacacttgagtgacaatgacatccactttgcctttctctccacaggtgtccactcccaggtccaactgcaggtcgagcatgcatctagggcggccaattggatcctaccgttcgtataatgtatgctatacgaagttatcgtacgcttaattaactgatccggaattccgccccccccccccccccccctctccctcccccccccctaacgttactggccgaagccgcttggaataaggccggtgtgcgtttgtctatatgttattttccaccatattgccgtcttttggcaatgtgagggcccggaaacctggccctgtcttcttgacgagcattcctaggggtctttcccctctcgccaaaggaatgcaaggtctgttgaatgtcgtgaaggaagcagttcctctggaagcttcttgaagacaaacaacgtctgtagcgaccctttgcaggcagcggaaccccccacctggcgacaggtgcctctgcggccaaaagccacgtgtataagatacacctgcaaaggcggcacaaccccagtgccacgttgtgagttggatagttgtggaaagagtcaaatggctctcctcaagcgtattcaacaaggggctgaaggatgcccagaaggtaccccattgtatgggatctgatctggggcctcggtgcacatgctttacatgtgtttagtcgaggttaaaaaaacgtctaggccccccgaaccacggggacgtggttttcctttgaaaaacacgatgataagcttgccacaaccatggctgaacaagatggattgcacgcaggttctccggccgcttgggtggagaggctattcggctatgactgggcacaacagacaatcggctgctctgatgccgccgtgttccggctgtcagcgcaggggcgcccggttctttttgtcaagaccgacctgtccggtgccctgaatgaactgcaggacgaggcagcgcggctatcgtggctggccacgacgggcgttccttgcgcagctgtgctcgacgttgtcactgaagcgggaagggactggctgctattgggcgaagtgccggggcaggatctcctgtcatctcaccttgctcctgccgagaaagtatccatcatggctgatgcaatgcggcggctgcatacgcttgatccggctacctgcccattcgaccaccaagcgaaacatcgcatcgagcgagcacgtactcggatggaagccggtcttgtcgatcaggatgatctggacgaagagcatcaggggctcgcgccagccgaactgttcgccaggctcaaggcgcgcatgcccgacggcgaggatctcgtcgtgacccatggcgatgcctgcttgccgaatatcatggtggaaaatggccgcttttctggattcatcgactgtggccggctgggtgtggcggaccgctatcaggacatagcgttggctacccgtgatattgctgaagagcttggcggcgaatgggctgaccgcttcctcgtgctttacggtatcgccgctcccgattcgcagcgcatcgccttctatcgccttcttgacgagttcttctgaataacttcgtataatgtatgctatacgaacggtaggatcccgcccgccccacgacccgcagcgcccgaccgaaaggagcgcacgaccccatggctccgaccgaagccacccggggcggccccgccgaccccgcacccgcccccgaggcccaccgactctagataactgatcataatcagccataccacatttgtagaggttttacttgctttaaaaaacctcccacacctccccctgaacctgaaacataaaatgaatgcaattgttgttgttaacttgtttattgcagcttataatggttacaaataaagcaatagcatcacaaatttcacaaataaagcatttttttcactgtatgcaaaccacctcctggtgtcccccaacccttcatagccccccaccccgtctcggtcgcccacccaaccctccacattaaccccttcctccccacgctcgtcccccgattcccaccccccttttcgtcaccatgcaccccccgtcccgcgaggacttcgaaggccccttccgcaacgcctccatcctctgccagacccgcgggcgccgccgtcccgccgaggtcacgtggtacaaaaatggcagccccgtcgccgccgccgccgccaccaccgccaccaccgtcggccccgaagtggtggccgagagccgcatcagcgtcaccgaaagcgaatgggacaccggggccaccttcagctgcgtcgtggagggggagatgaggaacaccagcaagaggatggagtgcggatgtaagtggagggggggttttttggggggggatttggggggaaattgggggctttgggggcaaaaagtccgtcattttggtttggaaggggtcgatgtgggggaaaatgtgccaaaaatcccaattttgggggcactgaagtcgtaatttgaggtggaggaaggtagacagaaagagggtggagtgcggatgtaagtggagggggatttggggcagatttgggggaaattgggggtttggggggcaaataatccgtagtttcggtttggaaggggttgatgtggttttgtgctgaatttcgggggaaaaactgccaaaaatcccaattttgggggcattgaagtcatagtttgaggttggaaggaggtagagagcaagaggatgaagtgaggatgtaagtcgggggatttttggggcagatttgggggaaattgggggttttggggtcagagaatccgtaggtcgaccgcgccagcttttgttccctttagtgagggttaattgcgcgcttggcgtaatcatggtcatagctgtttcctgtgtgaaattgttatccgctcacaattccacacaacatacgagccggaagcataaagtgtaaagcctggggtgcctaatgagtgagctaactcacattaattgcgttgcgctcactgcccgctttccagtcgggaaacctgtcgtgccagctgcattaatgaatcggccaacgcgcggggagaggcggtttgcgtattgggcgctcttccgcttcctcgctcactgactcgctgcgctcggtcgttcggctgcggcgagcggtatcagctcactcaaaggcggtaatacggttatccacagaatcaggggataacgcaggaaagaacatgtgagcaaaaggccagcaaaaggccaggaaccgtaaaaaggccgcgttgctggcgtttttccataggctccgcccccctgacgagcatcacaaaaatcgacgctcaagtcagaggtggcgaaacccgacaggactataaagataccaggcgtttccccctggaagctccctcgtgcgctctcctgttccgaccctgccgcttaccggatacctgtccgcctttctcccttcgggaagcgtggcgctttctcatagctcacgctgtaggtatctcagttcggtgtaggtcgttcgctccaagctgggctgtgtgcacgaaccccccgttcagcccgaccgctgcgccttatccggtaactatcgtcttgagtccaacccggtaagacacgacttatcgccactggcagcagccactggtaacaggattagcagagcgaggtatgtaggcggtgctacagagttcttgaagtggtggcctaactacggctacactagaaggacagtatttggtatctgcgctctgctgaagccagttaccttcggaaaaagagttggtagctcttgatccggcaaacaaaccaccgctggtagcggtggtttttttgtttgcaagcagcagattacgcgcagaaaaaaaggatctcaagaagatcctttgatcttttctacggggtctgacgctcagtggaacgaaaactcacgttaagggattttggtcatgagattatcaaaaaggatcttcacctagatccttttaaattaaaaatgaagttttaaatcaatctaaagtatatatgagtaaacttggtctgacagttaccaatgcttaatcagtgaggcacctatctcagcgatctgtctatttcgttcatccatagttgcctgactccccgtcgtgtagataactacgatacgggagggcttaccatctggccccagtgctgcaatgataccgcgagacccacgctcaccggctccagatttatcagcaataaaccagccagccggaagggccgagcgcagaagtggtcctgcaactttatccgcctccatccagtctattaattgttgccgggaagctagagtaagtagttcgccagttaatagtttgcgcaacgttgttgccattgctacaggcatcgtggtgtcacgctcgtcgtttggtatggcttcattcagctccggttcccaacgatcaaggcgagttacatgatcccccatgttgtgcaaaaaagcggttagctccttcggtcctccgatcgttgtcagaagtaagttggccgcagtgttatcactcatggttatggcagcactgcataattctcttactgtcatgccatccgtaagatgcttttctgtgactggtgagtactcaaccaagtcattctgagaatagtgtatgcggcgaccgagttgctcttgcccggcgtcaatacgggataataccgcgccacatagcagaactttaaaagtgctcatcattggaaaacgttcttcggggcgaaaactctcaaggatcttaccgctgttgagatccagttcgatgtaacccactcgtgcacccaactgatcttcagcatcttttactttcaccagcgtttctgggtgagcaaaaacaggaaggcaaaatgccgcaaaaaagggaataagggcgacacggaaatgttgaatactcatactcttcctttttcaatattattgaagcatttatcagggttattgtctcatgagcggatacatatttgaatgtatttagaaaaataaacaaataggggttccgcgcacatttccccgaaaagtgc

SEQ ID NO: 53 - DNA, 2449 bp, Homo sapiens
ctggcccatcctctctgttagatgtgatcaaaactcataaaggctgtccctgaggtttctgtcccaggactgattgcggaagagtcaccaggcactgaggagacggtgaccagggtgccctggccccagacgtccataccgtagtagtagtagtaggttcctttcgcacagtaatatacggccgtgtcctcggctctcaggctgttcatttgcagatacagcgtgttcttggaattgtctctggagatggtgaaccggccctggaacttctgtgcgtagattgtttcaccatcttcaggatcaaaacctgagacccactccagccccttccctggagcctggcggacccagtgcatggataattcgctaaaggtgaatccagaggctgcacaggagagtctcagggaccccccaggctgtaccaagcctcccccagactccaacagctgcacctcgtactagacgtagtacgtgatacgtcgtatctggcccatcctctctgttagatgtgatcaaaactcataaaggctgtccctgaggtttctgtcccaggactgattgcggaagagtcaccaggcactgaggagacggtgaccagggtgccctggccccagtagtcaaagtagtaataggataaccttaaatctttcgcacagtaatatacggccgtgtcctcggctctcaggctgttcatttgcagatacagcgtgttcttggaattgtctctggagatggtgaaccggccctggagcttctgtgcatagtttgtgttaccattgtaagcgctgatccatgagacccactccagccccttccctggagcctggcggacccagctgataccatagctgctaaaggtgaatccagaggctgcacaggagagtctcagggaccccccaggctgtaccaagcctcccccagactccaacagctgcacctcgtatctctcgcactactatgagacgtatcactggcccatcctctctgttagatgtgatcaaaactcataaaggctgtccctgaggtttctgtcccaggactgattgcggaagagtcaccaggcacgaggtgcagctgttggagtctgggggaggcttggtacagcctggggggtccctgagactctcctgtgcagcctctggattcacctttagcagttatgatatcaactgggtccgccaggctccagggaaggggctggagtgggtctcatggatgaaccctaacagtggtaacacaggctatgcacagaagttccagggccggttcaccatctccagagacaattccaagaacacgctgtatctgcaaatgaacagcctgagagccgaggacacggccgtatattactgtgcgaaatccagcagctggcactactactacggtatggacgtctggggccagggcaccctggtcaccgtctcctcacgcatagagagacacgcgagtagagacacggaattcctggcccatcctctctgttagatgtgatcaaaactcataaaggctgtccctgaggtttctgtcccaggactgattgcggaagagtcaccaggcactgaggagacggtgaccagggtgccctggccccagtagtcaaagtggacgtagtaataaccactactagacgctttcgcacagtaatatacggccgtgtcctcggctctcaggctgttcatttgcagatacagcgtgttcttggaattgtctctggagatggtgaaccggccctggaacttctgtgaatattttgtgttaccattgccagcgttgatccatgagacccactccagccccttccctggagcctggcggacccaatgcatagcatagctgctaaaggtgaatccagaggctgcacaggagagtctcagggaccccccaggctgtaccaagcctcccccagactccaacagctgcacctcctcgcgatatcgtgtctgatctacagtgctctggcccatcctctctgttagatgtgatcaaaactcataaaggctgtccctgaggtttctgtcccaggactgattgcggaagagtcaccaggcactgaggagacggtgaccagggtgccctggccccaggggtcgaaccagttgagggtagtcaccgtatagccccaacctttcgcacagtaatatacggccgtgtcctcggctctcaggctgttcatttgcagatacagcgtgttcttggaattgtctctggagatggtgaaccggccctgaaacttctgtgcatagtttgtgccaccactgttagggttgatccatgagacccactccagccccttccctggagcctggcggacccagtgcatatagtagccgctaaaggtgaatccagaggctgcacaggagagtctcagggaccccccaggctgtaccaagcctcccccagactccaacagctgcacctcgtatgtacaggagcgtagaggagtgactag

SEQ ID NO: 54 - DNA, 2581 bp, Gallus gallus
tgggtcagtcgaagggggcggtcggtccatcatttgcggccgggtgatttttggggccgaaaagtgggaatttggggcccaatttggggcccaatttggggcccaatttgggttttcgaggggggatttttttagggggagattttgggtccccggaaaatggtgattttgggtcaaaaatggggattttggggtcgttttgaggtggggttttttggggtagaaatggcggtctgaggggaaaatgtcgttttggggccattttgggccatttgaggggaaatttgggtcaaaaaatgacgattttgggtcgttttagggaggaaaatgaatttagggcgatttgagccaaatttgggtcaaaaatggcgattttgagtcaaaaaatgattattttgggtcattttagggaggaaaatgaatttagggagattggacggcaaatttgggtcaaaaaatggtgattttgggtcaaaaaatgattattttgggtcattttagggagaaaaatgaatttagggagatttgagggcaaatttgggtcaaaaaatggtgatttggggtcattttcagaagaaaaaatgattattttccccactaaaaatgtatattttggggccaaatggtgaaaaatggtgatttttaatcaaacgtccccaaaattggggaaatttcatcgatttgacccaaaattgagttttttttccctgttaaaaatgtacattttggggtcaatcgctgaaatgttcccacttttcacttctttgcccccaaattttgctgtccggtgagaaattaattaattaatgatcattaattgatcgacaattaatggttattaattaattaataggtcctcttttggtgactccttcgcttttggggccaaaagtccataaattggccccaaaaaattaacgctgagtaattggattccaaagtattaatgataaacattaaaagtgtttaattaataatgatattaaacataatttcgtttttattatcgatttatcaacaacgatgaacgataatactttacaacaatcgctaataattaattaattatttaattaattaatttctaataattacttcgcattatcggacacgagatgttgtaattattaataatttaattcctaataattagaagattcgttgaaaatggtacttatctttacaaataatcacttctaataataatgattaataatagttaataacaacaatgacgataatgacgataatattaataatatgtgatatatttaatataaaattcgtattaatatattatatctacaaaatatgatataaaatataatattttatttatatataacacaatttattattattatcattattatcattattaatatcatcattattaacgttatcgaaatacttatttagaaataataaaaacggatttaatgatggcaacaaaaatattttattaatgttaaaaaaaaataattaataatttccaaagattcgaattcggggcaacgaacggcactcgataatttttaattaattaatagtttgaattaatcggtactttttaatcctccattttgcccgaaatcgccgttttttgccccaaattccccaccgcggcgttaaaaacataaagaaattaagcatcaaaagtgcccttttttggggttgttttgacccaaaaaaaaaatggccgaattgggggcggccgttttacggttgggttcattttgggttcaaaacagccaaaaatgggaactttgggtttcgaaaacaacaacaacaaaaaaacgggtttattttgggctcattttgggtgtttttgggtcaggaggagaaaaaataggaagtttgagagcgaaacaacggccgcttttggggggaaaacggccctttttggtcaacggcgggggaaaaaaaaaagcggagtttttggggtgaaaaagagcggttttgggtaaatttgggttttggggtaaaagtggaggattttgggcaatgggagttaaaaaatgggtgtttttatgggggttcggtgcagtttttcctgtttgatggggggtttattaatccggggggggggattaatgagaattaataatgttaatagaaatatctgggaaattaatagcaattattaattgttaatagttattaatagttctatatatctcacatctacgatacaatataatatcgttacaatcatatagtcgatatattacatataattatcagtaataataataagtaacaataattagcagtaattaataataataattaatagtattcgttaataagattattgataataattaagtagtagcgattaatagagatgggatttcgtgagaaatggaccaaatttgggccgttttgacccaaatttttggtggttttttttccgattctttgtgaatttcgggtcggattcatcagcaattaattacggttattaggggctattagaggcttttaattgggattattagagacttttaagcggatttggggacttttaagtggattttatgattcttaagtggattttgggtggattttaccgcttttg

SEQ ID NO: 55 - DNA, 13244 bp, Artificial Sequence
  Targeting vector
agcgtgaccgctacacttgccagcgccctagcgcccgctcctttcgctttcttccttcctttctcgccacgttcgccggctttccccgtcaagctctaaatcgggggctccctttagggttccgatttagtgctttacggcacctcgaccccaaaaaacttgattagggtgatggttcacgtagtgggccatcgccctgatagacggtttttcgccctttgacgttggagtccacgttctttaatagtggactcttgttccaaactggaacaacactcaaccctatctcggtctattcttttgatttataagggattttgccgatttcggcctattggttaaaaaaatgagctgatttaacaaaaatttaacgcgaattttaacaaaatattaacgcttacaatttccattcgccattcaggctgcgcaactgttgggaagggcgatcggtgcgggcctcttcgctattacgccagctggcgaaagggggatgtgctgcaaggcgattaagttgggtaacgccagggttttcccagtcacgacgttgtaaaacgacggccagtgagcgcgcgtaatacgactcactatagggcgaattgggtaccataagaatgcggccgcttcccgaagcgaaagccgcgtgttatttttgggtgggaaagccccgattcgctcctttttttttatttattatttttgttgtttttcgtgtctttttcttctccgttttgcagctgcggcctccaggtgtccccggccgtggtatttttgggtcgaaaaagccgctttttggctcacttggaaacctttcgggcgtctccaagcggagcgttggcgggaaatggtgttttttttgggttgttttcggtcccttttttcaccatttttgtggtttttcggcccattttcggcctcccccccccccccccccttcccgtggggctgcgctccgtggagcggaatggggtcgttaattaaggttaattggtttaattaatgggccgtgcagggagaagagggccgtgcggtggttgttagccctgattaatggcttggttgaggggagagtgtaattaagtgcttcgttagcactaattaatggcttgattgagaggagagtgtaattaaatgcttcataatccctaattaatggcttggttgagacaagagtgtaattaagtgcttcattagccctgattaatggcttggttgaggggagagtgtaattaaatgcttcgttagcactaattaatggcttgattgagaggagagtgtaattaaatgcttcataatccctaattaatggcttggttgagacaagagtgtaattaagtgcttcattagccctgattaatggcttggttgagaggagagtgtaattaaatgcttcattatccctaattagggactgaattccaaggagagtgtaattaagtgcttcattatccctaattaatggcttggttgagaggagagtgtaattaaatgctttgttagccctaattaatggtttgatggagaggagagtgtaattaagtgcttcattatccctaattaatggcttggttgaggggagagtgtaattaaatgcttagttagccctaattaatggcttggttgagaggagagtgtaattgaatgcttcattatccctaattagggattgaattgagaggagagtgtaattgaatgctttgttagccctaattagggattgaattgagaggagagtgtaattaaatgcctcattatccctaattagggattgaattgagaggagagtttaattaaatgcctcattatccctaattagggactgaattccgacgagagtgtaattaagtgcttcatttagccctaattaatggcttgattgagaggagagtgtaattaaatgcttcattatccctaattagggattgaattgagaggagagtgtaattaaatgcttcattatccctaattagggattgaattgagaggagagtgtaattaaatgcttcattatccctaattaatggcttggttgagaggggagtgtaattaagtgcttcgttatccctaattagggattgaattgtgaggagatggcaattaatacttcattatccctaattaatttaattagtccctattatccctaatttaattcatggtttggttgatggaagaatgtaattaaatgctttgttatccctaattaatggtttgattgagcggagagtgtaattaaatgcttcattatcccttattaatggttgtgtggaatgtagtgtaattagaagtccctaattaatggtttaattgagagaagactgcaattagatgactcatagcccctaataagtggtttaattatgagataatcacaattacatgtttcattgtccctaattaatcgtttaattgcgagaagatcacaattaattaaatgatccctaatttcaatttctgagaagtgtctttctcggaaattgagatatcataagaattcgcgatcaatttctgagaactgtcattctcggaatacctactagtataagaatggtcatcatcagtcgacctactactactcgagctggcccatcctctctgttagatgtgatcaaaactcataaaggctgtccctgaggtttctgtcccaggactgattgcggaagagtcaccaggcactgaggagacggtgaccagggtgccctggccccagacgtccataccgtagtagtagtagtaggttcctttcgcacagtaatatacggccgtgtcctcggctctcaggctgttcatttgcagatacagcgtgttcttggaattgtctctggagatggtgaaccggccctggaacttctgtgcgtagattgtttcaccatcttcaggatcaaaacctgagacccactccagccccttccctggagcctggcggacccagtgcatggataattcgctaaaggtgaatccagaggctgcacaggagagtctcagggaccccccaggctgtaccaagcctcccccagactccaacagctgcacctcgtactagacgtagtacgtgatacgtcgtatctggcccatcctctctgttagatgtgatcaaaactcataaaggctgtccctgaggtttctgtcccaggactgattgcggaagagtcaccaggcactgaggagacggtgaccagggtgccctggccccagtagtcaaagtagtaataggataaccttaaatctttcgcacagtaatatacggccgtgtcctcggctctcaggctgttcatttgcagatacagcgtgttcttggaattgtctctggagatggtgaaccggccctggagcttctgtgcatagtttgtgttaccattgtaagcgctgatccatgagacccactccagccccttccctggagcctggcggacccagctgataccatagctgctaaaggtgaatccagaggctgcacaggagagtctcagggaccccccaggctgtaccaagcctcccccagactccaacagctgcacctcgtatctctcgcactactatgagacgtatcactggcccatcctctctgttagatgtgatcaaaactcataaaggctgtccctgaggtttctgtcccaggactgattgcggaagagtcaccaggcacgaggtgcagctgttggagtctgggggaggcttggtacagcctggggggtccctgagactctcctgtgcagcctctggattcacctttagcagttatgatatcaactgggtccgccaggctccagggaaggggctggagtgggtctcatggatgaaccctaacagtggtaacacaggctatgcacagaagttccagggccggttcaccatctccagagacaattccaagaacacgctgtatctgcaaatgaacagcctgagagccgaggacacggccgtatattactgtgcgaaatccagcagctggcactactactacggtatggacgtctggggccagggcaccctggtcaccgtctcctcacgcatagagagacacgcgagtagagacacggaattcctggcccatcctctctgttagatgtgatcaaaactcataaaggctgtccctgaggtttctgtcccaggactgattgcggaagagtcaccaggcactgaggagacggtgaccagggtgccctggccccagtagtcaaagtggacgtagtaataaccactactagacgctttcgcacagtaatatacggccgtgtcctcggctctcaggctgttcatttgcagatacagcgtgttcttggaattgtctctggagatggtgaaccggccctggaacttctgtgaatattttgtgttaccattgccagcgttgatccatgagacccactccagccccttccctggagcctggcggacccaatgcatagcatagctgctaaaggtgaatccagaggctgcacaggagagtctcagggaccccccaggctgtaccaagcctcccccagactccaacagctgcacctcctcgcgatatcgtgtctgatctacagtgctctggcccatcctctctgttagatgtgatcaaaactcataaaggctgtccctgaggtttctgtcccaggactgattgcggaagagtcaccaggcactgaggagacggtgaccagggtgccctggccccaggggtcgaaccagttgagggtagtcaccgtatagccccaacctttcgcacagtaatatacggccgtgtcctcggctctcaggctgttcatttgcagatacagcgtgttcttggaattgtctctggagatggtgaaccggccctgaaacttctgtgcatagtttgtgccaccactgttagggttgatccatgagacccactccagccccttccctggagcctggcggacccagtgcatatagtagccgctaaaggtgaatccagaggctgcacaggagagtctcagggaccccccaggctgtaccaagcctcccccagactccaacagctgcacctcgtatgtacaggagcgtagaggagtgactaggaattcctactactagcaatgttggcgcagaagggattcatatcaattaattccctgtcctcaattaatgcataattgggagtgcgatggaatcattcaataagtaatgaggacttggtgtcaaaatgccaattaagtaattaatgacacccaattaatacacaatggggattacagtggaataactcagtgaagttcatatctaaattgcaattgaataattaattacagctaattaatggatgggagactggcagtggtataacttaatgaaggaacacagtgaattcctgtctgaattgaaattaattgatttattagggctaattaatgaatggtggggttaaaaatagcattactcagcgaaggaacatgagttcatggctaaattgagattgaattattaattacaactaattgattaatgactgatgggagtaagaatggaataactcagtgaaggaacacaatggattcatggcctaattgaaattaaatggttaattagagctaattaatgaatgatggggggtggcaatggaatgatacaagaaagaaacacaatgggttcgtgtctacattgaaattaaataattaattacagctaattaataaacggcgaggttgacaatggtataactgtgaagagacagaatgagttcgtgactaaattggtattaaatgattaattagagctaattaacaggtggtggggctgagaatggcataactcaatgggggatgatgagctgatggcttaattggaattaataattaatcacaaccaattaacaggtgctgttaatggggttacaggggcatgacttcaggaagaagcacaaagtggccattaaataattaattgcacccaattaattcctgatggggattactgcagaggaactcagcgaaggattcaagcagaaatgacacagttaggttgctcaattgcgttaattaattaaaatcgctaattaggtgagcttcattaaggcctgatggggttcatcccaacgctgggatcaaagaactcagcgcagagtggataacgataattagaaggggacaaattaatgaggaaacacgactttgggcctagacggccattaaatcattaatcaacccgacgggcgcccaattaatcataaagttattaagcaattaagtcgaggctgacgagaaaccgcaacgagagccctccacgctcctttgagttggcgcaaacaacaaacaacgcgggctcgttaagcagcgacgacgccgagcgtaacgaagcaatccccgcgcccgacaattaacgcgctaacgaagccggagccctccttatgcaaattagcccctccagagggccataaaagcgccggctctccgacggcgcgggaggagcaccagtcggctccgcaaccatgagcccactcgtctcctccctcctgctcctggccgccctgccaggtgagggcgctgtggggctctatggggctctatggggtctcagcggggctctgcgggctcaatgggggccaaagggggggtctgcgggctctatgggggggtcaacggggggtctcacggggggccggctccgcgaggccgtgtggcggcggctccgtcagcgctctctgggcgcgcctccttccccacagggctgatggcggaggtgcagctgttggagtctgggggaggcttggtacagcctggggggtccctgagactctcctgtgcagcctctggattcacctttagcagctatgccatgagctgggtccgccaggctccagggaaggggctggagtgggtctcagctattagtggtagtggtggtagcacatactacgcagactccgtgaagggccggttcaccatctccagagacaattccaagaacacgctgtatctgcaaatgaacagcctgagagccgaggacacggccgtatattactgtgcgaaaggatatagtggctacgattactactttgactactggggccagggcaccctggtcaccgtctcctcaggtgagtcttcatatgaaccccccccaaaattgccgcggcgattttggggcaaaatcgggcgattttatggatcccctaccgttcgtataatgtatgctatacgaagttatagatccagacatgataagatacattgatgagtttggacaaaccacaactagaatgcagtgaaaaaaatgctttatttgtgaaatttgtgatgctattgctttatttgtaaccattataagctgcaataaacaagttaacaacaacaattgcattcattttatgtttcaggttcagggggaggtgtgggaggttttttaaagcaagtaaaacctctacaaatgtggtatggctgattatgatctctagtcaaggcactatacatcaaatattccttattaacccctttacaaattaaaaagctaaaggtacacaatttttgagcatagttattaatagcagacactctatgcctgtgtggagtaagaaaaaacagtatgttatgattataactgttatgcctacttataaaggttacagaatatttttccataattttcttgtatagcagtgcagctttttcctttgtggtgtaaatagcaaagcaagcaagagttctattactaaacacagcatgactcaaaaaacttagcaattctgaaggaaagtccttggggtcttctacctttctcttcttttttggaggagtagaatgttgagagtcagcagtagcctcatcatcactagatggcatttcttctgagcaaaacaggttttcctcattaaaggcattccaccactgctcccattcatcagttccataggttggaatctaaaatacacaaacaattagaatcagtagtttaacacattatacacttaaaaattttatatttaccttagagctttaaatctctgtaggtagtttgtccaattatgtcacaccacagaagtaaggttccttcacaaagatccggaccaaagcggccatcgtgcctccccactcctgcagttcgggggcatggatgcgcggatagccgctgctggtttcctggatgccgacggatttgcactgccggtagaactccgcgaggtcgtccagcctcaggcagcagccaagcttggtatggtaaaacttttaatttcgggtatatttgagtggaatgagttcttcaatcgtagttttgactaacttgccattcatttctattaacacaaaacaatctggtgcatagtctgaaatcaactccctacacataccacaaggacttaccactcgaatacttctatctacttcgtcagaataagggtgtctaacagctacaatcgtgtcaaaatccttttgtccattcgaaactgcactaccaatcgcaatggcttctgcacaaacagttactcgtcctatatacgcttcaatatgtactgccgaaatgatttctcctgttttcgtacgaattgccgctcccacatgatgtttattatcctcataaagcattgtaatcttctctgtcgctacttctactaattctagatcttgttgagaaatgttaaatgttttcatatattcttcttcctccgatttctgcaaaaatgaatccaagcttgaattaattctttgccaaaatgatgagacagcacaataaccagcacgttgcccaggagtaggaaaaagaagaaggcatgaacatggttagcagaggctctagagccgccggtcacacgccagaagccgaaccccgccctgccccgtcccccccgaaggcagccgtccccccgcggacagccccgaggctggagagggagaaggggacggcggcgcggcgacgcacgaaggccctccccgcccatttccttcctgccggcgccgcaccgcttcgccccgcgcccgctagagggggtgcggcggcgcctcccagatttcggctccgcacagatttgggacaaaggaagtccctgcgccctctcgcacgattaccataaaaggcaatggctgcggctcgccgcgcctcgacagccgccggcgctccgggggccgccgcgcccctcccccgagccctccccggcccgaggcggccccgccccgcccggcacccccacctgccgccaccccccgcccggcacggcgagccccgcgccacgccccgtacggagccccgcacccgaagccgggccgtgctcagcaactcggggaggggggtgcacgggggggttgcagcccgaccgacgcgcccacmccccctgctcacccccccacgcacacaccccgcacgcagcctttgttcccctcgcagccccccccgcaccgcggggcaccgcccccggccgcgctccctcgcgcacactgcggagcgcacaaagccccgcgccgcgcccgcagcgctcacagccgccgggcagcgcggagccgcacgcggcgctccccacgcacacacacacgcacgcaccccccgagccgctccccccgcacaaagggccctcccggagcccctcaaggctttcacgcagccacagaaaagaaacaagccgtcawwaaaccaagcactrattacagcccggaggtgaagggccgttyckcccgcatcaymtktgggwktaaagcgrtcagtcagarcckgggcggsmggcgygraacgrcggcggarcagggctcgggggdaaggcagsstgcaacgaytmccgccccccccacsctttgytttttaaagggccsccgccgccgccgcctcsccmtaaaaggaaactttyggagcgcgccgctttgattggctgccgccgcaccttttcgcctcgccccgccccgcccctcgccccgccccgccccgcctggcgcgcgccccccccccccccccgcccccatcgctgcacaaaataattaaaaaataaataaatacaaaattgggggtggggaggggggggagatggggagagtgaagcagaacgtggggctcacctcgaggatctgggctagccctgatcaataacttcgtataatgtatgctatacgaacggtaggggatccactagttgggtcagtcgaagggggcggtcggtccatcatttgcggccgggtgatttttggggccgaaaagtgggaatttggggcccaatttggggcccaatttggggcccaatttgggttttcgaggggggatttttttagggggagattttgggtccccggaaaatggtgattttgggtcaaaaatggggattttggggtcgttttgaggtggggttttttggggtagaaatggcggtctgaggggaaaatgtcgttttggggccattttgggccatttgaggggaaatttgggtcaaaaaatgacgattttgggtcgttttagggaggaaaatgaatttagggcgatttgagccaaatttgggtcaaaaatggcgattttgagtcaaaaaatgattattttgggtcattttagggaggaaaatgaatttagggagattggacggcaaatttgggtcaaaaaatggtgattttgggtcaaaaaatgattattttgggtcattttagggagaaaaatgaatttagggagatttgagggcaaatttgggtcaaaaaatggtgatttggggtcattttcagaagaaaaaatgattattttccccactaaaaatgtatattttggggccaaatggtgaaaaatggtgatttttaatcaaacgtccccaaaattggggaaatttcatcgatttgacccaaaattgagttttttttccctgttaaaaatgtacattttggggtcaatcgctgaaatgttcccacttttcacttctttgcccccaaattttgctgtccggtgagaaattaattaattaatgatcattaattgatcgacaattaatggttattaattaattaataggtcctcttttggtgactccttcgcttttggggccaaaagtccataaattggccccaaaaaattaacgctgagtaattggattccaaagtattaatgataaacattaaaagtgtttaattaataatgatattaaacataatttcgtttttattatcgatttatcaacaacgatgaacgataatactttacaacaatcgctaataattaattaattatttaattaattaatttctaataattacttcgcattatcggacacgagatgttgtaattattaataatttaattcctaataattagaagattcgttgaaaatggtacttatctttacaaataatcacttctaataataatgattaataatagttaataacaacaatgacgataatgacgataatattaataatatgtgatatatttaatataaaattcgtattaatatattatatctacaaaatatgatataaaatataatattttatttatatataacacaatttattattattatcattattatcattattaatatcatcattattaacgttatcgaaatacttatttagaaataataaaaacggatttaatgatggcaacaaaaatattttattaatgttaaaaaaaaataattaataatttccaaagattcgaattcggggcaacgaacggcactcgataatttttaattaattaatagtttgaattaatcggtactttttaatcctccattttgcccgaaatcgccgttttttgccccaaattccccaccgcggcgttaaaaacataaagaaattaagcatcaaaagtgcccttttttggggttgttttgacccaaaaaaaaaatggccgaattgggggcggccgttttacggttgggttcattttgggttcaaaacagccaaaaatgggaactttgggtttcgaaaacaacaacaacaaaaaaacgggtttattttgggctcattttgggtgtttttgggtcaggaggagaaaaaataggaagtttgagagcgaaacaacggccgcttttggggggaaaacggccctttttggtcaacggcgggggaaaaaaaaaagcggagtttttggggtgaaaaagagcggttttgggtaaatttgggttttggggtaaaagtggaggattttgggcaatgggagttaaaaaatgggtgtttttatgggggttcggtgcagtttttcctgtttgatggggggtttattaatccggggggggggattaatgagaattaataatgttaatagaaatatctgggaaattaatagcaattattaattgttaatagttattaatagttctatatatctcacatctacgatacaatataatatcgttacaatcatatagtcgatatattacatataattatcagtaataataataagtaacaataattagcagtaattaataataataattaatagtattcgttaataagattattgataataattaagtagtagcgattaatagagatgggatttcgtgagaaatggaccaaatttgggccgttttgacccaaatttttggtggttttttttccgattctttgtgaatttcgggtcggattcatcagcaattaattacggttattaggggctattagaggcttttaattgggattattagagacttttaagcggatttggggacttttaagtggattttatgattcttaagtggattttgggtggattttaccgcttttggcggccgccaccgcggtggagctccagcttttgttccctttagtgagggttaattgcgcgcttggcgtaatcatggtcatagctgtttcctgtgtgaaattgttatccgctcacaattccacacaacatacgagccggaagcataaagtgtaaagcctggggtgcctaatgagtgagctaactcacattaattgcgttgcgctcactgcccgctttccagtcgggaaacctgtcgtgccagctgcattaatgaatcggccaacgcgcggggagaggcggtttgcgtattgggcgctcttccgcttcctcgctcactgactcgctgcgctcggtcgttcggctgcggcgagcggtatcagctcactcaaaggcggtaatacggttatccacagaatcaggggataacgcaggaaagaacatgtgagcaaaaggccagcaaaaggccaggaaccgtaaaaaggccgcgttgctggcgtttttccataggctccgcccccctgacgagcatcacaaaaatcgacgctcaagtcagaggtggcgaaacccgacaggactataaagataccaggcgtttccccctgtaagctccctcgtgcgctctcctgttc

SEQ ID NO: 56 - DNA, 41 bp, Artificial Sequence; identical to SEQ ID NO: 48
  Synthetic Primer

SEQ ID NO: 57 - DNA, 54 bp, Artificial Sequence
  Synthetic Primer
  misc_feature (26)..(35): n is a, c, g, or t
cgtatcgcctccctcgcgccatcagnnnnnnnnnnggggggggttcatatgaag

SEQ ID NO: 58 - DNA, 10240 bp, Artificial Sequence
  Targeting vector
cacctgacgcgccctgtagcggcgcattaagcgcggcgggtgtggtggttacgcgcagcgtgaccgctacacttgccagcgccctagcgcccgctcctttcgctttcttcccttcctttctcgccacgttcgccggctttccccgtcaagctctaaatcgggggctccctttagggttccgatttagtgctttacggcacctcgaccccaaaaaacttgattagggtgatggttcacgtagtgggccatcgccctgatagacggtttttcgccctttgacgttggagtccacgttctttaatagtggactcttgttccaaactggaacaacactcaaccctatctcggtctattcttttgatttataagggattttgccgatttcggcctattggttaaaaaaatgagctgatttaacaaaaatttaacgcgaattttaacaaaatattaacgcttacaatttccattcgccattcaggctgcgcaactgttgggaagggcgatcggtgcgggcctcttcgctattacgccagctggcgaaagggggatgtgctgcaaggcgattaagttgggtaacgccagggttttcccagtcacgacgttgtaaaacgacggccagtgagcgcgcgtaatacgactcactatagggcgaattgggtaccgggccccccctcgagtgaaggtcaccaaggatggagacttcagagctatctgggacacgtgttttaacgtttgatcagccttgcagcaaaacagtgttttgctctattgaacagtgttcaacaaaaacgatcagtggtctggaacacatctcctacgaagaaaggttgcgagagctgggtctggagaagaggaggctctggggcaacctccctgtggcctgtcagtgcttaaaggaggctcaagagaaagatggagagagactttatacacggagctgtagcaatatgacaaggagaaatggtttaaaatggaaagagggtagatttaggttagctatcaagaagaaattcttcactcagaggtgatgaagcactgtagcaggttgcccagagaagtattggatgcttccttcctggcagggcccaaggccagactggatgggttctgggcagcctgttctggtgggagatgtccctgcccgtggcacggcttggaaatgggtagcctttgaggtccctctcagcccaaatcattctatgttcttgtggttccctgcatttcagcctttgcctgttgactctggtgccactgttggacaattctactcagctgtgtttcatccctgccccaaagcagtaatcccatggataagcaatgctctgaggccttcaccaccatcagggctcctgctgaccctagcggcctcccttgcagcatgagccctttgttgtccgcactgctgctgctgagggtcctgccagccccccagggccttttctgcccaggcactgccacctgctaaaacccagcctgcccatggcagggcatcgcatgtctgagggatggaacggggcaagggcagtgctgcaggcagtggttcaagaaacgtttagatgttgtactgagggatgtggtttagtgggaaatactggtgataggtggatggttggactggaggatcttagaggtcttttccaaccttggtgattatgtgattctatgaagggagccatagcctgctcccatcatgccccgccagtccggctctcccgagcactttggttccgcagcatccaggcccgctctggggccggtgtgggcctgggtgctgccacgtgtccccgctgcaaggcctggccaaccccgctgtgccacaatgcaggggctgggctaggagtgggcagggaggtgtggggagaggtgtaggacgtggctgggagcgcagggagttatttgcataggggggcgtgctgcggaaggacgcgggtataaaagggcatcgaggtccccggcacagccccatcggcgtggggacacacagctgctgggattccgccatggcctgggctcctctcctcctggcggtgctcgcccacacctcaggtactcgttgcgcccggtcggggactgtgggcacggggctctgtcccactgctgcgcgggcagggctgtgcgtgcggggccgtcactgattgccgttttctcccctctctcctctccggcgcgcctctccaggttccctggtgcaggcacagtctgccctgactcagcctgcctccgtgtctgggtctcctggacagtcgatcaccatctcctgcactggaaccagcagtgacgttggtggttataactatgtctcctggtaccaacaaaacccaggcaaagcccccaaactcatgatttatgatgtcagtaatcggccctcagggatttctaatcgcttctctggctccaagtctggcaacacggcctccctgaccatctctgggctccaggctgacgacgaggctgattattactgcacctcatatacaaacgacagcaattctcaggtattcggcggagggaccaagctgaccgtcctaggtgagtcgctcatatgggatcctaccgttcgtatagcatacattatacgaagttatcagacatgataagatacattgatgagtttggacaaaccacaactagaatgcagtgaaaaaaatgctttatttgtgaaatttgtgatgctattgctttatttgtaaccattataagctgcaataaacaagttggggtgggcgaagaactccagcatgagatccccgcgctggaggatcatccagccggcgtcccggaaaacgattccgaagcccaacctttcatagaaggcggcggtggaatcgaaatctcgtagcacgtgtcagtcctgctcctcggccacgaagtgcttagccctcccacacataaccagagggcagcaattcacgaatcccaactgccgtcggctgtccatcactgtccttcactatggctttgatcccaggatgcagatcgagaagcacctgtcggcaccgtccgcaggggctcaagatgcccctgttctcatttccgatcgcgacgatacaagtcaggttgccagctgccgcagcagcagcagtgcccagcaccacgagttctgcacaaggtcccccagtaaaatgatatacattgacaccagtgaagatgcggccgtcgctagagagagctgcgctggcgacgctgtagtcttcagagatggggatgctgttgattgtagccgttgctctttcaatgagggtggattcttcttgagacaaaggcttggccatggtttagttcctcaccttgtcgtattatactatgccgatatactatgccgatgattaattgtcaacacgtgctgatcagatccgaaaatggatatacaagctcccgggagctttttgcaaaagcctaggcctccaaaaaagcctcctcactacttctggaatagctcagaggcagaggcggcctcggcctctgcataaataaaaaaaattagtcagccatggggcggagaatgggcggaactgggcggagttaggggcgggatgggcggagttaggggcgggactatggttgctgactaattgagatgcatgctttgcatacttctgcctgctggggagcctggggactttccacacctggttgctgactaattgagatgcatgctttgcatacttctgcctgctggggagcctggggactttccacaccctaactgacacacattccacagataacttcgtatagcatacattatacgaaatggcggatccactagttctagagacctcgtctcggtctttcttcccccatcgtgaaattgtgacattttgtcgatttttggtgatttgggggtttttcttggacttggcggcaggctggggtctgccaccggcgcagggccgggcactcagcgcgacagcctgggctgagtcttgtccccaccgagccggagggctccggtgtgcgccatggaggacttagggttattttgtcaatggaaagttcttaaaatttgaccagaaaatgtgcccgaggtctgtctctgccacacgatttcagaaattgtgtctaggtcgatgagaagacagtttttgtctttgtcaggaaattagttgtgagttgttagtccttccctcttagtcctaaggactaagacctttgtccccggtctggtctctcactggggactcttggctccagtgccatggggagcccaagtgtcactgacacggtgtccttgggggtgaaattcagtttttcagctgtccaggtaagtgctgtcaaaaaatggaggttattctgctgaaaaagctgagaggaatattttgtcatttttttcggaaatatatatatatatatatatataaatatataaattatttatatattttatatatatatatatataaaatatatgtatttctctctttctttttatatatatatataaatatatatatatttctccctctttctttatatatatttatagggagagaatctatatttttggccaatttggccaatttctctctctctctctttatatatatatatatatgtatatgtaatttatatatatatatataaatttatatttatttatttatttatttatatagattatttttatatacatatatatatataaatttggccaatttagaagaaattggccaaaaaaacccaatctgaaccaaattacttagggcataagtccaaaaaaaaagtgcagttcaagaattcctcgctggaaagtttttaatgggggcagttcttccccattttctggtgtagatatgagtgaagatatagatatgtatgtagatatagatttggctatagtttgtttgatgaacagtctgaggaagagtaaatcttgccttcctcatggcaatttttaattctacttcttctgagacaagtctgaacatgccttgaggtagaaagagcccgaaaattgagtgctttttctttgaaattttaattaaaattaaaaaatagccttacagcaggaaagaaagggggtgatggcagctaatcggagttccaaagctgaaccacgttcacccaaacacgtggttgaaattttgtgtgtgtatatatataaatatatatatgtatacaaaagaaaatgcctatatataaaaaaattgttatgtatattatatagatttattatagatatgtacataagatataacacgtatacatatatatgtagtctgctgtatgctttgtataaatttttatagatatgatgtatattatatgcatgggttatatatctataatatattttatctgtagaaggaactacagtataaaatgcatatatgcgtatatatacacatatttatatatatgtgtatatatatgtatacgcacacgtataacatccatgaaaatagatatggatgggtggatgtgtttgttttacagaggtgcatgtgtgtctgtacatacacagccatacatacgcgtgtggcgcgcctctgcctctctcttgcaggtcagcccaaggctgccccctcggtcactctgttcccgccctcctctgaggagcttcaagccaacaaggccacactggtgtgtctcataagtgacttctacccgggagccgtgacagtggcctggaaggcagatagcagccccgtcaaggcgggagtggagaccaccacaccctccaaacaaagcaacaacaagtacgcggccagcagctacctgagcctgacgcctgagcagtggaagtcccacagaagctacagctgccaggtcacgcatgaagggagcaccgtggagaagacagtggcccctacagaatgttcatagtagtcccactccatatgtcccactggggatgcaatgtgaggacagtggttcctcaccctccctgtccctctgggccgctgctggtggcagcagccctcacttcccactcagatgtcccccaccgtgcccccatcacccacctctgcctgtcgactcctcttgccctcatctctccaggtgtcacattaataaacggatccacgacactgaactagtgctgactctgcatccatgtctctgtgtccttttgcgtgctgtctgcatctcacacaggggggtcggccccagtatggggaagggctggggggcgcatacacacatattggtaatgttgggggcggggggggggggtgggggggtcaacagatcagcactggagacactggtgtataccctggcaccaccaacatctaaggcagggtgctttggggcaattttggggcagtttaaggtctgtgctggcactgagcacgtggctgtggccgtgctgtcctcatctcccacccactacggtctgtgcgccaggtccctagcagagatttgctttatgctgggaacagggggagttctggctctgttcccttgcattcagacaccctggtgccccctgggtgggatgtcagtgtgaatactcctttgtgccctgtgcctgcagcagcctgaccctccacacaccacacgccttgtgtgcaccccacccctgtcactatccctctccccgctccccagggagattttgcagtggcccctgtagggcagcttttagcacagcccccagcagcaagcaagcagaaagcactgctgtgcacagcttgtcagctgtgtgtgtttgctgaggaggatctgtcttttgctgaggccatcagtcttgtcctgctcaacctccatcgatgctgcccacctcaacacatctacccatctattccatctacaccaacatctccattcatcccacccacccaaacatgtccatccatcacaacacctccatccaacccgcacactccagcacctccaatcattccatctacaccaccatgctgatctgctacagccactccaacgcaaccgtccattccatctacaccaatgtccatccatcccagccactccagcacctccagccatcccacccaccctatgtctccatccagccactggtggggtgcaggacatggggccagctctactgtcaggactggggtttttgcatggccccataccacttctgcagaagagacgcactgaaagtttggctgaccattttctccacggtagagttgtggcagttctgtaatttagggtcttttatccagtttggagatgggctgggatctcccagctccatggcaggcattcatgacactgggtttagtatctgatgggtgggatgtggctgaacttcattttctttccccagtgacaaagtttttgcagttgaatatgaattcctgctttctgctctatgagttgtttttttcccaggacgtacacagggaatcagcagtcttcattctccctctgccatgtgtagactctctgccacacaggactgtgctgtcctcatgcccctgcgcccaaattgctgccctctgcccatgcctgccaagctgagccctgcaggctgccatgctggattgacatgagccctgagattggtacagaaatggtgattttggggttttctttgcactcaggaagctgaaggctcaatgctcagtgatggatttaccaaactgtgccctgaggcagctgctcatgctggataaagtcactggagcacagggaaccaggcgctgggcagggatttctcatgggccccacttggaaagctgcaggctgcaaacctggctctgccttcacgcctcaccctcatgaggacaacctcactaattattgattaaaagattttgctaaaccatctccagaagcaacaacccactgaggagcatgtgctgaattatacatcacagctccacggccctgccctcatagcagggctgcatggcacccacagtggcactcagagggaccacagggctgagacagccgggtctggtggtggggacacagctgagcataggatgagccccccgggcagtgctgggctttgctaatgagcagaagtatggatagaaagcaaccccagggctccgtacccagctgcagctcttgctctgtcgtgtcctttggcggccgccaccgcggtggagctccagcttttgttccctttagtgagggttaattgcgcgcttggcgtaatcatggtcatagctgtttcctgtgtgaaattgttatccgctcacaattccacacaacatacgagccggaagcataaagtgtaaagcctggggtgcctaatgagtgagctaactcacattaattgcgttgcgctcactgcccgctttccagtcgggaaacctgtcgtgccagctgcattaatgaatcggccaacgcgcggggagaggcggtttgcgtattgggcgctcttccgcttcctcgctcactgactcgctgcgctcggtcgttcggctgcggcgagcggtatcagctcactcaaaggcggtaatacggttatccacagaatcaggggataacgcaggaaagaacatgtgagcaaaaggccagcaaaaggccaggaaccgtaaaaaggccgcgttgctggcgtttttccataggctccgcccccctgacgagcatcacaaaaatcgacgctcaagtcagaggtggcgaaacccgacaggactataaagataccaggcgtttccccctggaagctccctcgtgcgctctcctgttccgaccctgccgcttaccggatacctgtccgcctttctcccttcgggaagcgtggcgctttctcatagctcacgctgtaggtatctcagttcggtgtaggtcgttcgctccaagctgggctgtgtgcacgaaccccccgttcagcccgaccgctgcgccttatccggtaactatcgtcttgagtccaacccggtaagacacgacttatcgccactggcagcagccactggtaacaggattagcagagcgaggtatgtaggcggtgctacagagttcttgaagtggtggcctaactacggctacactagaaggacagtatttggtatctgcgctctgctgaagccagttaccttcggaaaaagagttggtagctcttgatccggcaaacaaaccaccgctggtagcggtggtttttttgtttgcaagcagcagattacgcgcagaaaaaaaggatctcaagaagatcctttgatcttttctacggggtctgacgctcagtggaacgaaaactcacgttaagggattttggtcatgagattatcaaaaaggatcttcacctagatccttttaaattaaaaatgaagttttaaatcaatctaaagtatatatgagtaaacttggtctgacagttaccaatgcttaatcagtgaggcacctatctcagcgatctgtctatttcgttcatccatagttgcctgactccccgtcgtgtagataactacgatacgggagggcttaccatctggccccagtgctgcaatgataccgcgagacccacgctcaccggctccagatttatcagcaataaaccagccagccggaagggccgagcgcagaagtggtcctgcaactttatccgcctccatccagtctattaattgttgccgggaagctagagtaagtagttcgccagttaatagtttgcgcaacgttgttgccattgctacaggcatcgtggtgtcacgctcgtcgtttggtatggcttcattcagctccggttcccaacgatcaaggcgagttacatgatcccccatgttgtgcaaaaaagcggttagctccttcggtcctccgatcgttgtcagaagtaagttggccgcagtgttatcactcatggttatggcagcactgcataattctcttactgtcatgccatccgtaagatgcttttctgtgactggtgagtactcaaccaagtcattctgagaatagtgtatgcggcgaccgagttgctcttgcccggcgtcaatacgggataataccgcgccacatagcagaactttaaaagtgctcatcattggaaaacgttcttcggggcgaaaactctcaaggatcttaccgctgttgagatccagttcgatgtaacccactcgtgcacccaactgatcttcagcatcttttactttcaccagcgtttctgggtgagcaaaaacaggaaggcaaaatgccgcaaaaaagggaataagggcgacacggaaatgttgaatactcatactcttcctttttcaatattattgaagcatttatcagggttattgtctcatgagcggatacatatttgaatgtatttagaaaaataaacaaataggggttccgcgcacatttccccgaaaagtgc

SEQ ID NO: 59 - DNA, 26 bp, Artificial Sequence
  Synthetic DNA
gttaaccggtatgcatcgatttaaat

SEQ ID NO: 60 - DNA, 11743 bp, Artificial Sequence
  Targeting vector
tcgcgcgtttcggtgatgacggtgaaaacctctgacacatgcagctcccggagacggtcacagcttgtctgtaagcggatgccgggagcagacaagcccgtcagggcgcgtcagcgggtgttggcgggtgtcggggctggcttaactatgcggcatcagagcagattgtactgagagtgcaccatatgcggtgtgaaataccgcacagatgcgtaaggagaaaataccgcatcaggcgccattcgccattcaggctgcgcaactgttgggaagggcgatcggtgcgggcctcttcgctattacgccagctggcgaaagggggatgtgctgcaaggcgattaagttgggtaacgccagggttttcccagtcacgacgttgtaaaacgacggccagtgggtatcacgtggggcaaatcgagagctaccattggctatggggaggagaaaatgaggcgtgctacttcctcgttcctgcagtgcgtgtcgaggtgccgtgttggtcggatctcagtggcagagcaggatggtgagcggtggccttggggccgctccctcactctgctgggctggtgcggtggctccgggaccggactttcagtggtgtttggtgtggtgctcactgtcctttggtgtcactgtgtggtgaattccctcagctgggcggtgagagcccatgctgtgtcctggtaggagtagtctgggctgcagtgcgggctctttgtgcgtgttgggggcggttccctggaagctaattctggaagaaatcccggctgcctctgtaacagttgttggcgatgtcaaacaccctggagctgctgactggctctgtaccattgagtgatgcagtttaaacctctctctttcctcctgctgtgtgtgaagctggtgttagtgctaggagacctgcacatccctcaccgatgcagtggtttaccagcaaagttcaagagcctcctggttccagggaagattcagcatattttgtgtacaggaaacctctgcaccaaggagagctatgactacctcaggactttggctggagatgttcacgttgttaagggggactctgaggtaatgttcttgctgctgtgaattcctcagtcctccatcttacaagccgtagttgtcccactgaaagctgggaaacccttcggtgtttgcaattcctgagcgctaatgtgtgggggaaggatgtaggaacaaataaggctcaagagacaacaacttcctaggctcctcttattgcccttgtggtaagggaggacttggtgtgtagtggtaatacatgcactcaacttattaagttctcatagctgctgtgaagctgctgcagtccctcagatccctgcaggaagaggggactgactgactgttgaatagccttgaagctcctgctctgcatgtggttccggtcaggctcaagatcccagttcttagctcttcagttgctcttctgggggtatagtactagcatctgggtcactgcagatggacagagactgtgcttgggtagcaaaaggcagacttacgttgtgaaaccttcattgtgttggtgaggttctttgatttctaccttgtgtatctctcttcctcagagtctgaattatcctgaacagaaggttgtaactgttgggcagttcagaattgggttgattcatggccatcaagtcattccctggggtgatgtggcaagcttggcattgctgcagaggcagctggatgtagacattcttatctcaggacatacacacagatttgaagcatttgagcatgaaaataagttctacatcaacccaggatcagctacaggagcctacactggtttacaaacgtgagtacaatgagccttgtgtttgtctttaagacagatgtctgtccttaagagtgcagcccatgtgttgaagagcactggtgagatgcagtgccatgcaggccatctctccctttcccagagaacacggcctacctctctctgttcataaggtcttggttaacttatgagttggccagcacagcctggcactgatgtgtcatgatcataaccctgagcccacgctctgctatgctgttgcttcttagagttgcattgccttgaggtgtattccagaagctgtgtgctgagctcttgttgggaaagaggccctcagggcactgccaacatctgaggcttgcaggagctggaacattcagccctgagggctgctctggccaactgcagctctgagtctgcagtcagtgcctctgagctgtgatgcttctcagataactgcagccctttgcaatgtaatgttttataatatatttccataggacatcttggtaagaggtgtaagctaatcagggtgattgacaaagtatgttttctttccaggaacgtcattccttcatttgtactgatggatatccaggcttccacagttgtgacttatgtataccagctaattgaggacgatgtgaaagtagaaagaattgagttcaagaaatactgacacgtgtttgaatctgcctgctgacttctcactgcctctcattctttctctcctagttaaagctgaatccggccacgtgggggtgctgctgcagcggcgtgtaactgtgagcttgggaagttctcaactagggcttagagcaggagaaactgattaacagaaattgccttattaaatgtatatatttcctgtgtctaagaacgaggtgctgttgttcctgacttgcggagctgcagctagtggtagcttggaatttaacctctcctgtaaaatgagcatagaataaaacagtattttcacatttctggatcctgttaattgtttgttaattaagaggacaggaattcagtgtcagggggctgctctttgcttcccaatgtgtaccactgaagcctctctggatttatcagagatactcaatggactcttaacagcactgtggcacctgacctcctgctgccttcagcctcccttcctggctggtgtgcttatgttgaggagctgtgggaggctggtgcagttctgtgggatgaggtaaggccagctgaatagcctgggggctggtcagggggcttagtgagaggagcagggctggggaatgttgtgaacagcaggtggtgccactgctattctgaggaaggaggcagcttctgcaaatgctttgcaatgcaggatgacaaagtgcttctgctagccctaggctaccgttcgtataatgtatactatacgaagttattttatttgtgaaatttgtgatgctattgctttatttgtaaccattataagctgcaataaacaagttggggtgggcgaagaactccagcatgagatccccgcgctggaggatcatccagccggcgtcccggaaaacgattccgaagcccaacctttcatagaaggcggcggtggaatcgaaatctcgtgatggcaggttgggcgtcgcttggtcggtcatttcgaaccccagagtcccgctcagaagaactcgtcaagaaggcgatagaaggcgatgcgctgcgaatcgggagcggcgataccgtaaagcacgaggaagcggtcagcccattcgccgccaagctcttcagcaatatcacgggtagccaacgctatgtcctgatagcggtccgccacacccagccggccacagtcgatgaatccagaaaagcggccattttccaccatgatattcggcaagcaggcatcgccatgggtcacgacgagatcctcgccgtcgggcatgcgcgccttgagcctggcgaacagttcggctggcgcgagcccctgatgctcttcgtccagatcatcctgatcgacaagaccggcttccatccgagtacgtgctcgctcgatgcgatgtttcgcttggtggtcgaatgggcaggtagccggatcaagcgtatgcagccgccgcattgcatcagccatgatggatactttctcggcaggagcaaggtgagatgacaggagatcctgccccggcacttcgcccaatagcagccagtcccttcccgcttcagtgacaacgtcgagcacagctgcgcaaggaacgcccgtcgtggccagccacgatagccgcgctgcctcgtcctgcagttcattcagggcaccggacaggtcggtcttgacaaaaagaaccgggcgcccctgcgctgacagccggaacacggcggcatcagagcagccgattgtctgttgtgcccagtcatagccgaatagcctctccacccaagcggccggagaacctgcgtgcaatccatcttgttcaatcatgcgaaacgatcctcatcctgtctcttgatcagatccgaaaatggatatacaagctcccgggagctttttgcaaaagcctaggcctccaaaaaagcctcctcactacttctggaatagctcagaggcagaggcggcctcggcctctgcataaataaaaaaaattagtcagccatggggcggagaatgggcggaactgggcggagttaggggcgggatgggcggagttaggggcgggactatggttgctgactaattgagatgcatgctttgcatacttctgcctgctggggagcctggggactttccacacctggttgctgactaattgagatgcatgctttgcatacttctgcctgctggggagcctggggactttccacaccctaaataacttcgtataatgtatactatacgaacggtagcgttaaccggtatgcatcgatttaaatcgagtgaaggtcaccaaggatggagacttcagagctatctgggacacgtgttttaacgtttgatcagccttgcagcaaaacagtgttttgctctattgaacagtgttcaacaaaaacgatcagtggtctggaacacatctcctacgaagaaaggttgcgagagctgggtctggagaagaggaggctctggggcaacctccctgtggcctgtcagtgcttaaaggaggctcaagagaaagatggagagagactttatacacggagctgtagcaatatgacaaggagaaatggtttaaaatggaaagagggtagatttaggttagctatcaagaagaaattcttcactcagaggtgatgaagcactgtagcaggttgcccagagaagtattggatgcttccttcctggcagggcccaaggccagactggatgggttctgggcagcctgttctggtgggagatgtccctgcccgtggcacggcttggaaatgggtagcctttgaggtccctctcagcccaaatcattctatgttcttgtggttccctgcatttcagcctttgcctgttgactctggtgccactgttggacaattctactcagctgtgtttcatccctgccccaaagcagtaatcccatggataagcaatgctctgaggccttcaccaccatcagggctcctgctgaccctagcggcctcccttgcagcatgagccctttgttgtccgcactgctgctgctgagggtcctgccagccccccagggccttttctgcccaggcactgccacctgctaaaacccagcctgcccatggcagggcatcgcatgtctgagggatggaacggggcaagggcagtgctgcaggcagtggttcaagaaacgtttagatgttgtactgagggatgtggtttagtgggaaatactggtgataggtggatggttggactggaggatcttagaggtcttttccaaccttggtgattatgtgattctatgaagggagccatagcctgctcccatcatgccccgccagtccggctctcccgagcactttggttccgcagcatccaggcccgctctggggccggtgtgggcctgggtgctgccacgtgtccccgctgcaaggcctggccaaccccgctgtgccacaatgcaggggctgggctaggagtgggcagggaggtgtggggagaggtgtaggacgtggctgggagcgcagggagttatttgcataggggggcgtgctgcggaaggacgcgggtataaaagggcatcgaggtccccggcacagccccatcggcgtggggacacacagctgctgggattccgccatggcctgggctcctctcctcctggcggtgctcgcccacacctcaggtactcgttgcgcccggtcggggactgtgggcacggggctctgtcccactgctgcgcgggcagggctgtgcgtgcggggccgtcactgattgccgttttctcccctctctcctctccggcgcgcctctccaggttccctggtgcaggcacagtctgccctgactcagcctgcctccgtgtctgggtctcctggacagtcgatcaccatctcctgcactggaaccagcagtgacgttggtggttataactatgtctcctggtaccaacaaaacccaggcaaagcccccaaactcatgatttatgatgtcagtaatcggccctcagggatttctaatcgcttctctggctccaagtctggcaacacggcctccctgaccatctctgggctccaggctgacgacgaggctgattattactgcacctcatatacaaacgacagcaattctcaggtattcggcggagggaccaagctgaccgtcctaggtgagtcgctcatatgctaccgttcgtatagcatacattatacgaagttatcagacatgataagatacattgatgagtttggacaaaccacaactagaatgcagtgaaaaaaatgctttatttgtgaaatttgtgatgctattgctttatttgtaaccattataagctgcaataaacaagttggggtgggcgaagaactccagcatgagatccccgcgctggaggatcatccagccggcgtcccggaaaacgattccgaagcccaacctttcatagaaggcggcggtggaatcgaaatctcgtagcacgtgtcagtcctgctcctcggccacgaagtgcttagccctcccacacataaccagagggcagcaattcacgaatcccaactgccgtcggctgtccatcactgtccttcactatggctttgatcccaggatgcagatcgagaagcacctgtcggcaccgtccgcaggggctcaagatgcccctgttctcatttccgatcgcgacgatacaagtcaggttgccagctgccgcagcagcagcagtgcccagcaccacgagttctgcacaaggtcccccagtaaaatgatatacattgacaccagtgaagatgcggccgtcgctagagagagctgcgctggcgacgctgtagtcttcagagatggggatgctgttgattgtagccgttgctctttcaatgagggtggattcttcttgagacaaaggcttggccatggtttagttcctcaccttgtcgtattatactatgccgatatactatgccgatgattaattgtcaacacgtgctgatcagatccgaaaatggatatacaagctcccgggagctttttgcaaaagcctaggcctccaaaaaagcctcctcactacttctggaatagctcagaggcagaggcggcctcggcctctgcataaataaaaaaaattagtcagccatggggcggagaatgggcggaactgggcggagttaggggcgggatgggcggagttaggggcgggactatggttgctgactaattgagatgcatgctttgcatacttctgcctgctggggagcctggggactttccacacctggttgctgactaattgagatgcatgctttgcatacttctgcctgctggggagcctggggactttccacaccctaactgacacacattccacagataacttcgtatagcatacattatacgaacggtagctctagagacctcgtctcggtctttcttcccccatcgtgaaattgtgacattttgtcgatttttggtgatttgggggtttttcttggacttggcggcaggctggggtctgccaccggcgcagggccgggcactcagcgcgacagcctgggctgagtcttgtccccaccgagccggagggctccggtgtgcgccatggaggacttagggttattttgtcaatggaaagttcttaaaatttgaccagaaaatgtgcccgaggtctgtctctgccacacgatttcagaaattgtgtctaggtcgatgagaagacagtttttgtctttgtcaggaaattagttgtgagttgttagtccttccctcttagtcctaaggactaagacctttgtccccggtctggtctctcactggggactcttggctccagtgccatggggagcccaagtgtcactgacacggtgtccttgggggtgaaattcagtttttcagctgtccaggtaagtgctgtcaaaaaatggaggttattctgctgaaaaagctgagaggaatattttgtcatttttttcggaaatatatatatatatatatatataaatatataaattatttatatattttatatatatatatatataaaatatatgtatttctctctttctttttatatatatatataaatatatatatatttctccctctttctttatatatatttatagggagagaatctatatttttggccaatttggccaatttctctctctctctctttatatatatatatatatgtatatgtaatttatatatatatatataaatttatatttatttatttatttatttatatagattatttttatatacatatatatatataaatttggccaatttagaagaaattggccaaaaaaacccaatctgaaccaaattacttagggcataagtccaaaaaaaaagtgcagttcaagaattcctcgctggaaagtttttaatgggggcagttcttccccattttctggtgtagatatgagtgaagatatagatatgtatgtagatatagatttggctatagtttgtttgatgaacagtctgaggaagagtaaatcttgccttcctcatggcaatttttaattctacttcttctgagacaagtctgaacatgccttgaggtagaaagagcccgaaaattgagtgctttttctttgaaattttaattaaaattaaaaaatagccttacagcaggaaagaaagggggtgatggcagctaatcggagttccaaagctgaaccacgttcacccaaacacgtggttgaaattttgtgtgtgtatatatataaatatatatatgtatacaaaagaaaatgcctatatataaaaaaattgttatgtatattatatagatttattatagatatgtacataagatataacacgtatacatatatatgtagtctgctgtatgctttgtataaatttttatagatatgatgtatattatatgcatgggttatatatctataatatattttatctgtagaaggaactacagtataaaatgcatatatgcgtatatatacacatatttatatatatgtgtatatatatgtatacgcacacgtataacatccatgaaaatagatatggatgggtggatgtgtttgttttacagaggtgcatgtgtgtctgtacatacacagccatacatacgcgtgtgcggccgcaggcgtaatcatggtcatagctgtttcctgtgtgaaattgttatccgctcacaattccacacaacatacgagccggaagcataaagtgtaaagcctggggtgcctaatgagtgagctaactcacattaattgcgttgcgctcactgcccgctttccagtcgggaaacctgtcgtgccagctgcattaatgaatcggccaacgcgcggggagaggcggtttgcgtattgggcgctcttccgcttcctcgctcactgactcgctgcgctcggtcgttcggctgcggcgagcggtatcagctcactcaaaggcggtaatacggttatccacagaatcaggggataacgcaggaaagaacatgtgagcaaaaggccagcaaaaggccaggaaccgtaaaaaggccgcgttgctggcgtttttccataggctccgcccccctgacgagcatcacaaaaatcgacgctcaagtcagaggtggcgaaacccgacaggactataaagataccaggcgtttccccctggaagctccctcgtgcgctctcctgttccgaccctgccgcttaccggatacctgtccgcctttctcccttcgggaagcgtggcgctttctcatagctcacgctgtaggtatctcagttcggtgtaggtcgttcgctccaagctgggctgtgtgcacgaaccccccgttcagcccgaccgctgcgccttatccggtaactatcgtcttgagtccaacccggtaagacacgacttatcgccactggcagcagccactggtaacaggattagcagagcgaggtatgtaggcggtgctacagagttcttgaagtggtggcctaactacggctacactagaagaacagtatttggtatctgcgctctgctgaagccagttaccttcggaaaaagagttggtagctcttgatccggcaaacaaaccaccgctggtagcggtggtttttttgtttgcaagcagcagattacgcgcagaaaaaaaggatctcaagaagatcctttgatcttttctacggggtctgacgctcagtggaacgaaaactcacgttaagggattttggtcatgagattatcaaaaaggatcttcacctagatccttttaaattaaaaatgaagttttaaatcaatctaaagtatatatgagtaaacttggtctgacagttaccaatgcttaatcagtgaggcacctatctcagcgatctgtctatttcgttcatccatagttgcctgactccccgtcgtgtagataactacgatacgggagggcttaccatctggccccagtgctgcaatgataccgcgagacccacgctcaccggctccagatttatcagcaataaaccagccagccggaagggccgagcgcagaagtggtcctgcaactttatccgcctccatccagtctattaattgttgccgggaagctagagtaagtagttcgccagttaatagtttgcgcaacgttgttgccattgctacaggcatcgtggtgtcacgctcgtcgtttggtatggcttcattcagctccggttcccaacgatcaaggcgagttacatgatcccccatgttgtgcaaaaaagcggttagctccttcggtcctccgatcgttgtcagaagtaagttggccgcagtgttatcactcatggttatggcagcactgcataattctcttactgtcatgccatccgtaagatgcttttctgtgactggtgagtactcaaccaagtcattctgagaatagtgtatgcggcgaccgagttgctcttgcccggcgtcaatacgggataataccgcgccacatagcagaactttaaaagtgctcatcattggaaaacgttcttcggggcgaaaactctcaaggatcttaccgctgttgagatccagttcgatgtaacccactcgtgcacccaactgatcttcagcatcttttactttcaccagcgtttctgggtgagcaaaaacaggaaggcaaaatgccgcaaaaaagggaataagggcgacacggaaatgttgaatactcatactcttcctttttcaatattattgaagcatttatcagggttattgtctcatgagcggatacatatttgaatgtatttagaaaaataaacaaataggggttccgcgcacatttccccgaaaagtgccacctgacgtctaagaaaccattattatcatgacattaacctataaaaataggcgtatcacgaggccctttcgtc

SEQ ID NO: 61 - DNA, 7001 bp, Homo sapiens
accggtcgacatgcaagcttgctagcgtttaaacacgagtgcgtacgctcgacaagacgcactccagtctgccctgactcagcctgcctccgtgtctgggtctcctggacagtcgatcaccatctcctgctctggaagcagctccaacatcggaagtaattatgtatactggtaccaacagcacccaggcaaagcccccaaactcatgatttataggaataatcagcggccctcaggggtttctaatcgcttctctggctccaagtctggcaacacggcctccctgaccatctctgggctccaggctgaggacgaggctgattattactgcgcagcatgggatgacagcctgagtggtcattgggtgttcggcggagggaccaagctgaccgtcctagcctgacacacacagccctccccagactgtgggatgaggccctgtgcccgcagtcacatgtggaatatcaagacacacacatctatgacaatcaccgtgtctctactcgcgtgtctctctatgcgcagtctgccctgactcagcctgcctccgtgtctgggtctcctggacagtcgatcaccatctcctgcactgggagcagctccaacatcggggcaggttatgatgtacactggtaccaacagcacccaggcaaagcccccaaactcatgatttatggtaacagcaatcggccctcaggggtttctaatcgcttctctggctccaagtctggcaacacggcctccctgaccatctctgggctccaggctgaggacgaggctgattattactgccagtcctatgacagcagcctgagtggttctgtggtattcggcggagggaccaagctgaccgtcctagcctgacacacacagccctccccagactgtgggatgaggccctgtgcccgcagtcacatgtggaatatcaagacacacacatctatgacaatcacatacgacgtatcacgtactacgtctagtaccagtctgccctgactcagcctgcctccgtgtctgggtctcctggacagtcgatcaccatctcctgctctggaagcagctccaacattgggaataattatgtatcctggtaccaacagcacccaggcaaagcccccaaactcatgatttatgacaataataagcgaccctcaggggtttctaatcgcttctctggctccaagtctggcaacacggcctccctgaccatctctgggctccaggctgaggacgaggctgattattactgcggaacatgggatagcagcctgagtgctggtgctgtgttcggcggagggaccaagctgaccgtcctagcctgacacacacagccctccccagactgtgggatgaggccctgtgcccgcagtcacatgtggaatatcaagacacacacatctatgacaatcaccgtagactagtacgagtatgtactctcgtgcagtctgccctgactcagcctgcctccgtgtctgggtctcctggacagtcgatcaccatctcctgcactgggagcagctccaacattggggcgggttatgttgtacattggtaccaacagcacccaggcaaagcccccaaactcatgatttatgaaaataataagcgaccctcaggggtttctaatcgcttctctggctccaagtctggcaacacggcctccctgaccatctctgggctccaggctgaggacgaggctgattattactgcagctcatatacaagcagcggcactcctgtggtattcggcggagggaccaagctgaccgtcctagcctgacacacacagccctccccagactgtgggatgaggccctgtgcccgcagtcacatgtggaatatcaagacacacacatctatgacaatcacacgcgagtatactactatgtactgtacagtcagtctgccctgactcagcctgcctccgtgtctgggtctcctggacagtcgatcaccatctcctgcactggaaccagcagtgatgttgggagttataaccttgtctcctggtaccaacagcacccaggcaaagcccccaaactcatgatttatgagggcagtaagcggccctcaggggtttctaatcgcttctctggctccaagtctggcaacacggcctccctgaccatctctgggctccaggctgaggacgaggctgattattactgccagtcctatgacagcagcctgagtggttgccagtcctatgacagcagcctgagtggtttggtgttcggcggagggaccaagctgaccgtcctagcctgacacacacagccctccccagactgtgggatgaggccctgtgcccgcagtcacatgtggaatatcaagacacacacatctatgacaatcacatagagtactcacgctacgtcagtagacgtcagtctgccctgactcagcctgcctccgtgtctgggtctcctggacagtcgatcaccatctcctgcgggggaaacaacattggaagtaaaaatgtgcactggtaccaacagcacccaggcaaagcccccaaactcatgatttatagggatagcaaccggccctctggggtttctaatcgcttctctggctccaagtctggcaacacggcctccctgaccatctctgggctccaggctgaggacgaggctgattattactgccagtcctatgacaggagtggttgggtgttcggcggagggaccaagctgaccgtcctagcctgacacacacagccctccccagactgtgggatgaggccctgtgcccgcagtcacatgtggaatatcaagacacacacatctatgacaatcactacgctgtcttagtgtagattcgatcacgtcagtctgccctgactcagcctgcctccgtgtctgggtctcctggacagtcgatcaccatctcctgctctggagaagcattgccaaaaaaatatgcttattggtaccaacagcacccaggcaaagcccccaaactcatgatttataaagacagcgagaggccctcaggggtttctaatcgcttctctggctccaagtctggcaacacggcctccctgaccatctctgggctccaggctgaggacgaggctgattattactgcaactcttttacaagcaccaccaattatgtcttattcggcggagggaccaagctgaccgtcctagcctgacacacacagccctccccagactgtgggatgaggccctgtgcccgcagtcacatgtggaatatcaagacacacacatctatgacaatcactgacgtatgttgtgagtagtacagtatatacagtctgccctgactcagcctgcctccgtgtctgggtctcctggacagtcgatcaccatctcctgcgggggaaacaacattggaagtaaaagtgtgcactggtaccaacagcacccaggcaaagcccccaaactcatgatttattatgatagcgaccggccctcaggggtttctaatcgcttctctggctccaagtctggcaacacggcctccctgaccatctctgggctccaggctgaggacgaggctgattattactgccaggtgtgggatgataatagtgatcatcttatattcggcggagggaccaagctgaccgtcctagcctgacacacacagccctccccagactgtgggatgaggccctgtgcccgcagtcacatgtggaatatcaagacacacacatctatgacaatcacagtatacataagtcgagagaagtgctacgacagtctgccctgactcagcctgcctccgtgtctgggtctcctggacagtcgatcaccatctcctgctctggagatgcattgccaaagcaatatgcttattggtaccaacagcacccaggcaaagcccccaaactcatgatttatgatgatagcgaccggccctcaggggtttctaatcgcttctctggctccaagtctggcaacacggcctccctgaccatctctgggctccaggctgaggacgaggctgattattactgcagctcatatgcaggcagcaacaattgggtgttcggcggagggaccaagctgaccgtcctagcctgacacacacagccctccccagactgtgggatgaggccctgtgcccgcagtcacatgtggaatatcaagacacacacatctatgacaatcaccgtacagtcacgtactcagactacgctctacagtctgccctgactcagcctgcctccgtgtctgggtctcctggacagtcgatcaccatctcctgcaccctaagcagtgagcacagcacctacaccatcgaatggtaccaacagcacccaggcaaagcccccaaactcatgatttatgttaagagtgatggcagccacagcaagggggacggggtttctaatcgcttctctggctccaagtctggcaacacggcctccctgaccatctctgggctccaggctgaggacgaggctgattattactgcggagagagccacacgattgatggccaagtcggtgtggtattcggcggagggaccaagctgaccgtcctagcctgacacacacagccctccccagactgtgggatgaggccctgtgcccgcagtcacatgtggaatatcaagacacacacatctatgacaatcactatatatacatatgctagtatcacgcgagacagtctgccctgactcagcctgcctccgtgtctgggtctcctggacagtcgatcaccatctcctgcactctgagcagtgggcacagcagctacgccatcgcatggtaccaacagcacccaggcaaagcccccaaactcatgatttatcttaacagtgatggcagccacagcaagggggacggggtttctaatcgcttctctggctccaagtctggcaacacggcctccctgaccatctctgggctccaggctgaggacgaggctgattattactgcagctcatatgcaggcaacaacaatttgggggatgtgcttttcggcggagggaccaagctgaccgtcctagcctgacacacacagccctccccagactgtgggatgaggccctgtgcccgcagtcacatgtggaatatcaagacacacacatctatgacaatcactgagtcagtatgtagtgtgatgtcacacgacagtctgccctgactcagcctgcctccgtgtctgggtctcctggacagtcgatcaccatctcctgcaccttgcgcagtggcatcaatgttggtacctacaggatatactggtaccaacagcacccaggcaaagcccccaaactcatgatttattacaaatcagactcagataagcagcagggctctggggtttctaatcgcttctctggctccaagtctggcaacacggcctccctgaccatctctgggctccaggctgaggacgaggctgattattactgcgcagcatgggatgacagcctgaatgtggtattcggcggagggaccaagctgaccgtcctagcctgacacacacagccctccccagactgtgggatgaggccctgtgcccgcagtcacatgtggaatatcaagacacacacatctatgacaatcacacatgacgacacgacagctcacgtctcatccagtctgccctgactcagcctgcctccgtgtctgggtctcctggacagtcgatcaccatctcctgcacccgcagcagtggcagcattgccagcaactatgtgcagtggtaccaacagcacccaggcaaagcccccaaactcatgatttatgaggataaccaaagaccctctggggtttctaatcgcttctctggctccaagtctggcaacacggcctccctgaccatctctgggctccaggctgaggacgaggctgattattactgccagtcctatgacagcagcctgaggagagtcttcggcggagggaccaagctgaccgtcctagcctgacacacacagccctccccagactgtgggatgaggccctgtgcccgcagtcacatgtggaatatcaagacacacacatctatgacaatcacagcgactagcagtagtgatcagtgacacaccagtctgccctgactcagcctgcctccgtgtctgggtctcctggacagtcgatcaccatctcctgcggctccagcactggagctgtcaccagtggtcattatccctactggtaccaacagcacccaggcaaagcccccaaactcatgatttatgatacaagcaacaaacactccggggtttctaatcgcttctctggctccaagtctggcaacacggcctccctgaccatctctgggctccaggctgaggacgaggctgattattactgcgcaacatgggatgacagcctgaatgagggagtgttcggcggagggaccaagctgaccgtcctagcctgacacacacagccctccccagactgtgggatgaggccctgtgcccgcagtcacatgtggaatatcaagacacacacatctatgacaatcacatctactgaccacgtagatccacgtgtcgccagtctgccctgactcagcctgcctccgtgtctgggtctcctggacagtcgatcaccatctcctgcaccctgagcagcggctacagtaattataaagtggactggtaccaacagcacccaggcaaagcccccaaactcatgatttatgtgggcactggtgggattgtgggatccaagggggatggggtttctaatcgcttctctggctccaagtctggcaacacggcctccctgaccatctctgggctccaggctgaggacgaggctgattattactgcggggcagaccatggcagtgggagcaacttcgtggtggtattcggcggagggaccaagctgaccgtcctagcctgacacacacagccctccccagactgtgggatgaggccctgtgcccgcagtcacatgtggaatatcaagacacacacatctatgacaatcacgtttaaacaagcttcgaagggcccatgcgaattccgcggatgcggcgcgcctctagaatgcatcgat

SEQ ID NO: 62 - DNA, 18736 bp, Artificial Sequence
  Targeting vector
tcgcgcgtttcggtgatgacggtgaaaacctctgacacatgcagctcccggagacggtcacagcttgtctgtaagcggatgccgggagcagacaagcccgtcagggcgcgtcagcgggtgttggcgggtgtcggggctggcttaactatgcggcatcagagcagattgtactgagagtgcaccatatgcggtgtgaaataccgcacagatgcgtaaggagaaaataccgcatcaggcgccattcgccattcaggctgcgcaactgttgggaagggcgatcggtgcgggcctcttcgctattacgccagctggcgaaagggggatgtgctgcaaggcgattaagttgggtaacgccagggttttcccagtcacgacgttgtaaaacgacggccagtgcggccgcgggtatcacgtggggcaaatcgagagctaccattggctatggggaggagaaaatgaggcgtgctacttcctcgttcctgcagtgcgtgtcgaggtgccgtgttggtcggatctcagtggcagagcaggatggtgagcggtggccttggggccgctccctcactctgctgggctggtgcggtggctccgggaccggactttcagtggtgtttggtgtggtgctcactgtcctttggtgtcactgtgtggtgaattccctcagctgggcggtgagagcccatgctgtgtcctggtaggagtagtctgggctgcagtgcgggctctttgtgcgtgttgggggcggttccctggaagctaattctggaagaaatcccggctgcctctgtaacagttgttggcgatgtcaaacaccctggagctgctgactggctctgtaccattgagtgatgcagtttaaacctctctctttcctcctgctgtgtgtgaagctggtgttagtgctaggagacctgcacatccctcaccgatgcagtggtttaccagcaaagttcaagagcctcctggttccagggaagattcagcatattttgtgtacaggaaacctctgcaccaaggagagctatgactacctcaggactttggctggagatgttcacgttgttaagggggactctgaggtaatgttcttgctgctgtgaattcctcagtcctccatcttacaagccgtagttgtcccactgaaagctgggaaacccttcggtgtttgcaattcctgagcgctaatgtgtgggggaaggatgtaggaacaaataaggctcaagagacaacaacttcctaggctcctcttattgcccttgtggtaagggaggacttggtgtgtagtggtaatacatgcactcaacttattaagttctcatagctgctgtgaagctgctgcagtccctcagatccctgcaggaagaggggactgactgactgttgaatagccttgaagctcctgctctgcatgtggttccggtcaggctcaagatcccagttcttagctcttcagttgctcttctgggggtatagtactagcatctgggtcactgcagatggacagagactgtgcttgggtagcaaaaggcagacttacgttgtgaaaccttcattgtgttggtgaggttctttgatttctaccttgtgtatctctcttcctcagagtctgaattatcctgaacagaaggttgtaactgttgggcagttcagaattgggttgattcatggccatcaagtcattccctggggtgatgtggcaagcttggcattgctgcagaggcagctggatgtagacattcttatctcaggacatacacacagatttgaagcatttgagcatgaaaataagttctacatcaacccaggatcagctacaggagcctacactggtttacaaacgtgagtacaatgagccttgtgtttgtctttaagacagatgtctgtccttaagagtgcagcccatgtgttgaagagcactggtgagatgcagtgccatgcaggccatctctccctttcccagagaacacggcctacctctctctgttcataaggtcttggttaacttatgagttggccagcacagcctggcactgatgtgtcatgatcataaccctgagcccacgctctgctatgctgttgcttcttagagttgcattgccttgaggtgtattccagaagctgtgtgctgagctcttgttgggaaagaggccctcagggcactgccaacatctgaggcttgcaggagctggaacattcagccctgagggctgctctggccaactgcagctctgagtctgcagtcagtgcctctgagctgtgatgcttctcagataactgcagccctttgcaatgtaatgttttataatatatttccataggacatcttggtaagaggtgtaagctaatcagggtgattgacaaagtatgttttctttccaggaacgtcattccttcatttgtactgatggatatccaggcttccacagttgtgacttatgtataccagctaattgaggacgatgtgaaagtagaaagaattgagttcaagaaatactgacacgtgtttgaatctgcctgctgacttctcactgcctctcattctttctctcctagttaaagctgaatccggccacgtgggggtgctgctgcagcggcgtgtaactgtgagcttgggaagttctcaactagggcttagagcaggagaaactgattaacagaaattgccttattaaatgtatatatttcctgtgtctaagaacgaggtgctgttgttcctgacttgcggagctgcagctagtggtagcttggaatttaacctctcctgtaaaatgagcatagaataaaacagtattttcacatttctggatcctgttaattgtttgttaattaagaggacaggaattcagtgtcagggggctgctctttgcttcccaatgtgtaccactgaagcctctctggatttatcagagatactcaatggactcttaacagcactgtggcacctgacctcctgctgccttcagcctcccttcctggctggtgtgcttatgttgaggagctgtgggaggctggtgcagttctgtgggatgaggtaaggccagctgaatagcctgggggctggtcagggggcttagtgagaggagcagggctggggaatgttgtgaacagcaggtggtgccactgctattctgaggaaggaggcagcttctgcaaatgctttgcaatgcaggatgacaaagtgcttctgctagccctaggctaccgttcgtataatgtatactatacgaagttattttatttgtgaaatttgtgatgctattgctttatttgtaaccattataagctgcaataaacaagttggggtgggcgaagaactccagcatgagatccccgcgctggaggatcatccagccggcgtcccggaaaacgattccgaagcccaacctttcatagaaggcggcggtggaatcgaaatctcgtgatggcaggttgggcgtcgcttggtcggtcatttcgaaccccagagtcccgctcagaagaactcgtcaagaaggcgatagaaggcgatgcgctgcgaatcgggagcggcgataccgtaaagcacgaggaagcggtcagcccattcgccgccaagctcttcagcaatatcacgggtagccaacgctatgtcctgatagcggtccgccacacccagccggccacagtcgatgaatccagaaaagcggccattttccaccatgatattcggcaagcaggcatcgccatgggtcacgacgagatcctcgccgtcgggcatgcgcgccttgagcctggcgaacagttcggctggcgcgagcccctgatgctcttcgtccagatcatcctgatcgacaagaccggcttccatccgagtacgtgctcgctcgatgcgatgtttcgcttggtggtcgaatgggcaggtagccggatcaagcgtatgcagccgccgcattgcatcagccatgatggatactttctcggcaggagcaaggtgagatgacaggagatcctgccccggcacttcgcccaatagcagccagtcccttcccgcttcagtgacaacgtcgagcacagctgcgcaaggaacgcccgtcgtggccagccacgatagccgcgctgcctcgtcctgcagttcattcagggcaccggacaggtcggtcttgacaaaaagaaccgggcgcccctgcgctgacagccggaacacggcggcatcagagcagccgattgtctgttgtgcccagtcatagccgaatagcctctccacccaagcggccggagaacctgcgtgcaatccatcttgttcaatcatgcgaaacgatcctcatcctgtctcttgatcagatccgaaaatggatatacaagctcccgggagctttttgcaaaagcctaggcctccaaaaaagcctcctcactacttctggaatagctcagaggcagaggcggcctcggcctctgcataaataaaaaaaattagtcagccatggggcggagaatgggcggaactgggcggagttaggggcgggatgggcggagttaggggcgggactatggttgctgactaattgagatgcatgctttgcatacttctgcctgctggggagcctggggactttccacacctggttgctgactaattgagatgcatgctttgcatacttctgcctgctggggagcctggggactttccacaccctaaataacttcgtataatgtatactatacgaacggtagcgttaaccggtcgacatgcaagcttgctagcgtttaaacacgagtgcgtacgctcgacaagacgcactccagtctgccctgactcagcctgcctccgtgtctgggtctcctggacagtcgatcaccatctcctgctctggaagcagctccaacatcggaagtaattatgtatactggtaccaacagcacccaggcaaagcccccaaactcatgatttataggaataatcagcggccctcaggggtttctaatcgcttctctggctccaagtctggcaacacggcctccctgaccatctctgggctccaggctgaggacgaggctgattattactgcgcagcatgggatgacagcctgagtggtcattgggtgttcggcggagggaccaagctgaccgtcctagcctgacacacacagccctccccagactgtgggatgaggccctgtgcccgcagtcacatgtggaatatcaagacacacacatctatgacaatcaccgtgtctctactcgcgtgtctctctatgcgcagtctgccctgactcagcctgcctccgtgtctgggtctcctggacagtcgatcaccatctcctgcactgggagcagctccaacatcggggcaggttatgatgtacactggtaccaacagcacccaggcaaagcccccaaactcatgatttatggtaacagcaatcggccctcaggggtttctaatcgcttctctggctccaagtctggcaacacggcctccctgaccatctctgggctccaggctgaggacgaggctgattattactgccagtcctatgacagcagcctgagtggttctgtggtattcggcggagggaccaagctgaccgtcctagcctgacacacacagccctccccagactgtgggatgaggccctgtgcccgcagtcacatgtggaatatcaagacacacacatctatgacaatcacatacgacgtatcacgtactacgtctagtaccagtctgccctgactcagcctgcctccgtgtctgggtctcctggacagtcgatcaccatctcctgctctggaagcagctccaacattgggaataattatgtatcctggtaccaacagcacccaggcaaagcccccaaactcatgatttatgacaataataagcgaccctcaggggtttctaatcgcttctctggctccaagtctggcaacacggcctccctgaccatctctgggctccaggctgaggacgaggctgattattactgcggaacatgggatagcagcctgagtgctggtgctgtgttcggcggagggaccaagctgaccgtcctagcctgacacacacagccctccccagactgtgggatgaggccctgtgcccgcagtcacatgtggaatatcaagacacacacatctatgacaatcaccgtagactagtacgagtatgtactctcgtgcagtctgccctgactcagcctgcctccgtgtctgggtctcctggacagtcgatcaccatctcctgcactgggagcagctccaacattggggcgggttatgttgtacattggtaccaacagcacccaggcaaagcccccaaactcatgatttatgaaaataataagcgaccctcaggggtttctaatcgcttctctggctccaagtctggcaacacggcctccctgaccatctctgggctccaggctgaggacgaggctgattattactgcagctcatatacaagcagcggcactcctgtggtattcggcggagggaccaagctgaccgtcctagcctgacacacacagccctccccagactgtgggatgaggccctgtgcccgcagtcacatgtggaatatcaagacacacacatctatgacaatcacacgcgagtatactactatgtactgtacagtcagtctgccctgactcagcctgcctccgtgtctgggtctcctggacagtcgatcaccatctcctgcactggaaccagcagtgatgttgggagttataaccttgtctcctggtaccaacagcacccaggcaaagcccccaaactcatgatttatgagggcagtaagcggccctcaggggtttctaatcgcttctctggctccaagtctggcaacacggcctccctgaccatctctgggctccaggctgaggacgaggctgattattactgccagtcctatgacagcagcctgagtggttgccagtcctatgacagcagcctgagtggtttggtgttcggcggagggaccaagctgaccgtcctagcctgacacacacagccctccccagactgtgggatgaggccctgtgcccgcagtcacatgtggaatatcaagacacacacatctatgacaatcacatagagtactcacgctacgtcagtagacgtcagtctgccctgactcagcctgcctccgtgtctgggtctcctggacagtcgatcaccatctcctgcgggggaaacaacattggaagtaaaaatgtgcactggtaccaacagcacccaggcaaagcccccaaactcatgatttatagggatagcaaccggccctctggggtttctaatcgcttctctggctccaagtctggcaacacggcctccctgaccatctctgggctccaggctgaggacgaggctgattattactgccagtcctatgacaggagtggttgggtgttcggcggagggaccaagctgaccgtcctagcctgacacacacagccctccccagactgtgggatgaggccctgtgcccgcagtcacatgtggaatatcaagacacacacatctatgacaatcactacgctgtcttagtgtagattcgatcacgtcagtctgccctgactcagcctgcctccgtgtctgggtctcctggacagtcgatcaccatctcctgctctggagaagcattgccaaaaaaatatgcttattggtaccaacagcacccaggcaaagcccccaaactcatgatttataaagacagcgagaggccctcaggggtttctaatcgcttctctggctccaagtctggcaacacggcctccctgaccatctctgggctccaggctgaggacgaggctgattattactgcaactcttttacaagcaccaccaattatgtcttattcggcggagggaccaagctgaccgtcctagcctgacacacacagccctccccagactgtgggatgaggccctgtgcccgcagtcacatgtggaatatcaagacacacacatctatgacaatcactgacgtatgttgtgagtagtacagtatatacagtctgccctgactcagcctgcctccgtgtctgggtctcctggacagtcgatcaccatctcctgcgggggaaacaacattggaagtaaaagtgtgcactggtaccaacagcacccaggcaaagcccccaaactcatgatttattatgatagcgaccggccctcaggggtttctaatcgcttctctggctccaagtctggcaacacggcctccctgaccatctctgggctccaggctgaggacgaggctgattattactgccaggtgtgggatgataatagtgatcatcttatattcggcggagggaccaagctgaccgtcctagcctgacacacacagccctccccagactgtgggatgaggccctgtgcccgcagtcacatgtggaatatcaagacacacacatctatgacaatcacagtatacataagtcgagagaagtgctacgacagtctgccctgactcagcctgcctccgtgtctgggtctcctggacagtcgatcaccatctcctgctctggagatgcattgccaaagcaatatgcttattggtaccaacagcacccaggcaaagcccccaaactcatgatttatgatgatagcgaccggccctcaggggtttctaatcgcttctctggctccaagtctggcaacacggcctccctgaccatctctgggctccaggctgaggacgaggctgattattactgcagctcatatgcaggcagcaacaattgggtgttcggcggagggaccaagctgaccgtcctagcctgacacacacagccctccccagactgtgggatgaggccctgtgcccgcagtcacatgtggaatatcaagacacacacatctatgacaatcaccgtacagtcacgtactcagactacgctctacagtctgccctgactcagcctgcctccgtgtctgggtctcctggacagtcgatcaccatctcctgcaccctaagcagtgagcacagcacctacaccatcgaatggtaccaacagcacccaggcaaagcccccaaactcatgatttatgttaagagtgatggcagccacagcaagggggacggggtttctaatcgcttctctggctccaagtctggcaacacggcctccctgaccatctctgggctccaggctgaggacgaggctgattattactgcggagagagccacacgattgatggccaagtcggtgtggtattcggcggagggaccaagctgaccgtcctagcctgacacacacagccctccccagactgtgggatgaggccctgtgcccgcagtcacatgtggaatatcaagacacacacatctatgacaatcactatatatacatatgctagtatcacgcgagacagtctgccctgactcagcctgcctccgtgtctgggtctcctggacagtcgatcaccatctcctgcactctgagcagtgggcacagcagctacgccatcgcatggtaccaacagcacccaggcaaagcccccaaactcatgatttatcttaacagtgatggcagccacagcaagggggacggggtttctaatcgcttctctggctccaagtctggcaacacggcctccctgaccatctctgggctccaggctgaggacgaggctgattattactgcagctcatatgcaggcaacaacaatttgggggatgtgcttttcggcggagggaccaagctgaccgtcctagcctgacacacacagccctccccagactgtgggatgaggccctgtgcccgcagtcacatgtggaatatcaagacacacacatctatgacaatcactgagtcagtatgtagtgtgatgtcacacgacagtctgccctgactcagcctgcctccgtgtctgggtctcctggacagtcgatcaccatctcctgcaccttgcgcagtggcatcaatgttggtacctacaggatatactggtaccaacagcacccaggcaaagcccccaaactcatgatttattacaaatcagactcagataagcagcagggctctggggtttctaatcgcttctctggctccaagtctggcaacacggcctccctgaccatctctgggctccaggctgaggacgaggctgattattactgcgcagcatgggatgacagcctgaatgtggtattcggcggagggaccaagctgaccgtcctagcctgacacacacagccctccccagactgtgggatgaggccctgtgcccgcagtcacatgtggaatatcaagacacacacatctatgacaatcacacatgacgacacgacagctcacgtctcatccagtctgccctgactcagcctgcctccgtgtctgggtctcctggacagtcgatcaccatctcctgcacccgcagcagtggcagcattgccagcaactatgtgcagtggtaccaacagcacccaggcaaagcccccaaactcatgatttatgaggataaccaaagaccctctggggtttctaatcgcttctctggctccaagtctggcaacacggcctccctgaccatctctgggctccaggctgaggacgaggctgattattactgccagtcctatgacagcagcctgaggagagtcttcggcggagggaccaagctgaccgtcctagcctgacacacacagccctccccagactgtgggatgaggccctgtgcccgcagtcacatgtggaatatcaagacacacacatctatgacaatcacagcgactagcagtagtgatcagtgacacaccagtctgccctgactcagcctgcctccgtgtctgggtctcctggacagtcgatcaccatctcctgcggctccagcactggagctgtcaccagtggtcattatccctactggtaccaacagcacccaggcaaagcccccaaactcatgatttatgatacaagcaacaaacactccggggtttctaatcgcttctctggctccaagtctggcaacacggcctccctgaccatctctgggctccaggctgaggacgaggctgattattactgcgcaacatgggatgacagcctgaatgagggagtgttcggcggagggaccaagctgaccgtcctagcctgacacacacagccctccccagactgtgggatgaggccctgtgcccgcagtcacatgtggaatatcaagacacacacatctatgacaatcacatctactgaccacgtagatccacgtgtcgccagtctgccctgactcagcctgcctccgtgtctgggtctcctggacagtcgatcaccatctcctgcaccctgagcagcggctacagtaattataaagtggactggtaccaacagcacccaggcaaagcccccaaactcatgatttatgtgggcactggtgggattgtgggatccaagggggatggggtttctaatcgcttctctggctccaagtctggcaacacggcctccctgaccatctctgggctccaggctgaggacgaggctgattattactgcggggcagaccatggcagtgggagcaacttcgtggtggtattcggcggagggaccaagctgaccgtcctagcctgacacacacagccctccccagactgtgggatgaggccctgtgcccgcagtcacatgtggaatatcaagacacacacatctatgacaatcacgtttaaacaagcttcgaagggcccatgcgaattccgcggatgcggcgcgcctctagaatgcatcgatttaaatcgagtgaaggtcaccaaggatggagacttcagagctatctgggacacgtgttttaacgtttgatcagccttgcagcaaaacagtgttttgctctattgaacagtgttcaacaaaaacgatcagtggtctggaacacatctcctacgaagaaaggttgcgagagctgggtctggagaagaggaggctctggggcaacctccctgtggcctgtcagtgcttaaaggaggctcaagagaaagatggagagagactttatacacggagctgtagcaatatgacaaggagaaatggtttaaaatggaaagagggtagatttaggttagctatcaagaagaaattcttcactcagaggtgatgaagcactgtagcaggttgcccagagaagtattggatgcttccttcctggcagggcccaaggccagactggatgggttctgggcagcctgttctggtgggagatgtccctgcccgtggcacggcttggaaatgggtagcctttgaggtccctctcagcccaaatcattctatgttcttgtggttccctgcatttcagcctttgcctgttgactctggtgccactgttggacaattctactcagctgtgtttcatccctgccccaaagcagtaatcccatggataagcaatgctctgaggccttcaccaccatcagggctcctgctgaccctagcggcctcccttgcagcatgagccctttgttgtccgcactgctgctgctgagggtcctgccagccccccagggccttttctgcccaggcactgccacctgctaaaacccagcctgcccatggcagggcatcgcatgtctgagggatggaacggggcaagggcagtgctgcaggcagtggttcaagaaacgtttagatgttgtactgagggatgtggtttagtgggaaatactggtgataggtggatggttggactggaggatcttagaggtcttttccaaccttggtgattatgtgattctatgaagggagccatagcctgctcccatcatgccccgccagtccggctctcccgagcactttggttccgcagcatccaggcccgctctggggccggtgtgggcctgggtgctgccacgtgtccccgctgcaaggcctggccaaccccgctgtgccacaatgcaggggctgggctaggagtgggcagggaggtgtggggagaggtgtaggacgtggctgggagcgcagggagttatttgcataggggggcgtgctgcggaaggacgcgggtataaaagggcatcgaggtccccggcacagccccatcggcgtggggacacacagctgctgggattccgccatggcctgggctcctctcctcctggcggtgctcgcccacacctcaggtactcgttgcgcccggtcggggactgtgggcacggggctctgtcccactgctgcgcgggcagggctgtgcgtgcggggccgtcactgattgccgttttctcccctctctcctctccggcgcgcctctccaggttccctggtgcaggcacagtctgccctgactcagcctgcctccgtgtctgggtctcctggacagtcgatcaccatctcctgcactggaaccagcagtgacgttggtggttataactatgtctcctggtaccaacaaaacccaggcaaagcccccaaactcatgatttatgatgtcagtaatcggccctcagggatttctaatcgcttctctggctccaagtctggcaacacggcctccctgaccatctctgggctccaggctgacgacgaggctgattattactgcacctcatatacaaacgacagcaattctcaggtattcggcggagggaccaagctgaccgtcctaggtgagtcgctcatatgctaccgttcgtatagcatacattatacgaagttatcagacatgataagatacattgatgagtttggacaaaccacaactagaatgcagtgaaaaaaatgctttatttgtgaaatttgtgatgctattgctttatttgtaaccattataagctgcaataaacaagttggggtgggcgaagaactccagcatgagatccccgcgctggaggatcatccagccggcgtcccggaaaacgattccgaagcccaacctttcatagaaggcggcggtggaatcgaaatctcgtagcacgtgtcagtcctgctcctcggccacgaagtgcttagccctcccacacataaccagagggcagcaattcacgaatcccaactgccgtcggctgtccatcactgtccttcactatggctttgatcccaggatgcagatcgagaagcacctgtcggcaccgtccgcaggggctcaagatgcccctgttctcatttccgatcgcgacgatacaagtcaggttgccagctgccgcagcagcagcagtgcccagcaccacgagttctgcacaaggtcccccagtaaaatgatatacattgacaccagtgaagatgcggccgtcgctagagagagctgcgctggcgacgctgtagtcttcagagatggggatgctgttgattgtagccgttgctctttcaatgagggtggattcttcttgagacaaaggcttggccatggtttagttcctcaccttgtcgtattatactatgccgatatactatgccgatgattaattgtcaacacgtgctgatcagatccgaaaatggatatacaagctcccgggagctttttgcaaaagcctaggcctccaaaaaagcctcctcactacttctggaatagctcagaggcagaggcggcctcggcctctgcataaataaaaaaaattagtcagccatggggcggagaatgggcggaactgggcggagttaggggcgggatgggcggagttaggggcgggactatggttgctgactaattgagatgcatgctttgcatacttctgcctgctggggagcctggggactttccacacctggttgctgactaattgagatgcatgctttgcatacttctgcctgctggggagcctggggactttccacaccctaactgacacacattccacagataacttcgtatagcatacattatacgaacggtagctctagagacctcgtctcggtctttcttcccccatcgtgaaattgtgacattttgtcgatttttggtgatttgggggtttttcttggacttggcggcaggctggggtctgccaccggcgcagggccgggcactcagcgcgacagcctgggctgagtcttgtccccaccgagccggagggctccggtgtgcgccatggaggacttagggttattttgtcaatggaaagttcttaaaatttgaccagaaaatgtgcccgaggtctgtctctgccacacgatttcagaaattgtgtctaggtcgatgagaagacagtttttgtctttgtcaggaaattagttgtgagttgttagtccttccctcttagtcctaaggactaagacctttgtccccggtctggtctctcactggggactcttggctccagtgccatggggagcccaagtgtcactgacacggtgtccttgggggtgaaattcagtttttcagctgtccaggtaagtgctgtcaaaaaatggaggttattctgctgaaaaagctgagaggaatattttgtcatttttttcggaaatatatatatatatatatatataaatatataaattatttatatattttatatatatatatatataaaatatatgtatttctctctttctttttatatatatatataaatatatatatatttctccctctttctttatatatatttatagggagagaatctatatttttggccaatttggccaatttctctctctctctctttatatatatatatatatgtatatgtaatttatatatatatatataaatttatatttatttatttatttatttatatagattatttttatatacatatatatatataaatttggccaatttagaagaaattggccaaaaaaacccaatctgaaccaaattacttagggcataagtccaaaaaaaaagtgcagttcaagaattcctcgctggaaagtttttaatgggggcagttcttccccattttctggtgtagatatgagtgaagatatagatatgtatgtagatatagatttggctatagtttgtttgatgaacagtctgaggaagagtaaatcttgccttcctcatggcaatttttaattctacttcttctgagacaagtctgaacatgccttgaggtagaaagagcccgaaaattgagtgctttttctttgaaattttaattaaaattaaaaaatagccttacagcaggaaagaaagggggtgatggcagctaatcggagttccaaagctgaaccacgttcacccaaacacgtggttgaaattttgtgtgtgtatatatataaatatatatatgtatacaaaagaaaatgcctatatataaaaaaattgttatgtatattatatagatttattatagatatgtacataagatataacacgtatacatatatatgtagtctgctgtatgctttgtataaatttttatagatatgatgtatattatatgcatgggttatatatctataatatattttatctgtagaaggaactacagtataaaatgcatatatgcgtatatatacacatatttatatatatgtgtatatatatgtatacgcacacgtataacatccatgaaaatagatatggatgggtggatgtgtttgttttacagaggtgcatgtgtgtctgtacatacacagccatacatacgcgtgtgcggccgcaggcgtaatcatggtcatagctgtttcctgtgtgaaattgttatccgctcacaattccacacaacatacgagccggaagcataaagtgtaaagcctggggtgcctaatgagtgagctaactcacattaattgcgttgcgctcactgcccgctttccagtcgggaaacctgtcgtgccagctgcattaatgaatcggccaacgcgcggggagaggcggtttgcgtattgggcgctcttccgcttcctcgctcactgactcgctgcgctcggtcgttcggctgcggcgagcggtatcagctcactcaaaggcggtaatacggttatccacagaatcaggggataacgcaggaaagaacatgtgagcaaaaggccagcaaaaggccaggaaccgtaaaaaggccgcgttgctggcgtttttccataggctccgcccccctgacgagcatcacaaaaatcgacgctcaagtcagaggtggcgaaacccgacaggactataaagataccaggcgtttccccctggaagctccctcgtgcgctctcctgttccgaccctgccgcttaccggatacctgtccgcctttctcccttcgggaagcgtggcgctttctcatagctcacgctgtaggtatctcagttcggtgtaggtcgttcgctccaagctgggctgtgtgcacgaaccccccgttcagcccgaccgctgcgccttatccggtaactatcgtcttgagtccaacccggtaagacacgacttatcgccactggcagcagccactggtaacaggattagcagagcgaggtatgtaggcggtgctacagagttcttgaagtggtggcctaactacggctacactagaagaacagtatttggtatctgcgctctgctgaagccagttaccttcggaaaaagagttggtagctcttgatccggcaaacaaaccaccgctggtagcggtggtttttttgtttgcaagcagcagattacgcgcagaaaaaaaggatctcaagaagatcctttgatcttttctacggggtctgacgctcagtggaacgaaaactcacgttaagggattttggtcatgagattatcaaaaaggatcttcacctagatccttttaaattaaaaatgaagttttaaatcaatctaaagtatatatgagtaaacttggtctgacagttaccaatgcttaatcagtgaggcacctatctcagcgatctgtctatttcgttcatccatagttgcctgactccccgtcgtgtagataactacgatacgggagggcttaccatctggccccagtgctgcaatgataccgcgagacccacgctcaccggctccagatttatcagcaataaaccagccagccggaagggccgagcgcagaagtggtcctgcaactttatccgcctccatccagtctattaattgttgccgggaagctagagtaagtagttcgccagttaatagtttgcgcaacgttgttgccattgctacaggcatcgtggtgtcacgctcgtcgtttggtatggcttcattcagctccggttcccaacgatcaaggcgagttacatgatcccccatgttgtgcaaaaaagcggttagctccttcggtcctccgatcgttgtcagaagtaagttggccgcagtgttatcactcatggttatggcagcactgcataattctcttactgtcatgccatccgtaagatgcttttctgtgactggtgagtactcaaccaagtcattctgagaatagtgtatgcggcgaccgagttgctcttgcccggcgtcaatacgggataataccgcgccacatagcagaactttaaaagtgctcatcattggaaaacgttcttcggggcgaaaactctcaaggatcttaccgctgttgagatccagttcgatgtaacccactcgtgcacccaactgatcttcagcatcttttactttcaccagcgtttctgggtgagcaaaaacaggaaggcaaaatgccgcaaaaaagggaataagggcgacacggaaatgttgaatactcatactcttcctttttcaatattattgaagcatttatcagggttattgtctcatgagcggatacatatttgaatgtatttagaaaaataaacaaataggggttccgcgcacatttccccgaaaagtgccacctgacgtctaagaaaccattattatcatgacattaacctataaaaataggcgtatcacgaggccctttcgtc

SEQ ID NO: 63 - DNA, 10494 bp, Artificial Sequence
  Targeting vector
cacctgacgcgccctgtagcggcgcattaagcgcggcgggtgtggtggttacgcgcagcgtgaccgctacacttgccagcgccctagcgcccgctcctttcgctttcttcccttcctttctcgccacgttcgccggctttccccgtcaagctctaaatcgggggctccctttagggttccgatttagtgctttacggcacctcgaccccaaaaaacttgattagggtgatggttcacgtagtgggccatcgccctgatagacggtttttcgccctttgacgttggagtccacgttctttaatagtggactcttgttccaaactggaacaacactcaaccctatctcggtctattcttttgatttataagggattttgccgatttcggcctattggttaaaaaatgagctgatttaacaaaaatttaacgcgaattttaacaaaatattaacgcttacaatttccattcgccattcaggctgcgcaactgttgggaagggcgatcggtgcgggcctcttcgctattacgccagctggcgaaagggggatgtgctgcaaggcgattaagttgggtaacgccagggttttcccagtcacgacgttgtaaaacgacggccagtgaattgtaatacgactcactatagggcgaattggaatgttggcgcagaagggattcatatcaattaattccctgtcctcaattaatgcataattgggagtgcgatggaatcattcaataagtaatgaggacttggtgtcaaaatgccaattaagtaattaatgacacccaattaatacacaatggggattacagtggaataactcagtgaagttcatatctaaattgcaattgaataattaattacagctaattaatggatgggagactggcagtggtataacttaatgaaggaacacagtgaattcctgtctgaattgaaattaattgatttattagggctaattaatgaatggtggggttaaaaatagcattactcagcgaaggaacatgagttcatggctaaattgagattgaattattaattacaactaattgattaatgactgatgggagtaagaatggaataactcagtgaaggaacacaatggattcatggcctaattgaaattaaatggttaattagagctaattaatgaatgatggggggtggcaatggaatgatacaagaaagaaacacaatgggttcgtgtctacattgaaattaaataattaattacagctaattaataaacggcgaggttgacaatggtataactgtgaagagacagaatgagttcgtgactaaattggtattaaatgattaattagagctaattaacaggtggtggggctgagaatggcataactcaatgggggatgatgagctgatggcttaattggaattaataattaatcacaaccaattaacaggtgctgttaatggggttacaggggcatgacttcaggaagaagcacaaagtggccattaaataattaattgcacccaattaattcctgatggggattactgcagaggaactcagcgaaggattcaagcagaaatgacacagttaggttgctcaattgcgttaattaattaaaatcgctaattaggtgagcttcattaaggcctgatggggttcatcccaacgctgggatcaaagaactcagcgcagagtggataacgataattagaaggggacaaattaatgaggaaacacgactttgggcctagacggccattaaatcattaatcaacccgacgggcgcccaattaatcataaagttattaagcaattaagtcgaggctgacgagaaaccgcaacgagagccctccacgctcctttgagttggcgcaaacaacaaacaacgcgggctcgttaagcagcgacgacgccgagcgtaacgaagcaatccccgcgcccgacaattaacgcgctaacgaagccggagccctccttatgcaaattagcccctccagagggccataaaagcgccggctctccgacggcgcgggaggagcaccagtcggctccgcaaccatgagcccactcgtctcctccctcctgctcctggccgccctgccaggtgagggcgctgtggggctctatggggctctatggggtctcagcggggctctgcgggctcaatgggggccaaagggggggtctgcgggctctatgggggggtcaacggggggtctcacggggggccggctccgcgaggccgtgtggcggcggctccgtcagcgctctctgggcgcgcctccttccccacagggctgatggcggaggtgcagctgttggagtctgggggaggcttggtacagcctggggggtccctgagactctcctgtgcagcctctggattcacctttagcagctatgccatgagctgggtccgccaggctccagggaaggggctggagtgggtctcagctattagtggtagtggtggtagcacatactacgcagactccgtgaagggccggttcaccatctccagagacaattccaagaacacgctgtatctgcaaatgaacagcctgagagccgaggacacggccgtatattactgtgcgaaaggatatagtggctacgattactactttgactactggggccagggcaccctggtcaccgtctcctcaggtgagtcttcatatgaaccccccccaaaattgccgcggcgattttggggcaaaatcgggcgattttatggatccccgctaccgttcgtatagcatacattatacgaagttatcagacatgataagatacattgatgagtttggacaaaccacaactagaatgcagtgaaaaaaatgctttatttgtgaaatttgtgatgctattgctttatttgtaaccattataagctgcaataaacaagttggggtgggcgaagaactccagcatgagatccccgcgctggaggatcatccagccggcgtcccggaaaacgattccgaagcccaacctttcatagaaggcggcggtggaatcgaaatctcgtagcacgtgtcagtcctgctcctcggccacgaagtgcttagccctcccacacataaccagagggcagcaattcacgaatcccaactgccgtcggctgtccatcactgtccttcactatggctttgatcccaggatgcagatcgagaagcacctgtcggcaccgtccgcaggggctcaagatgcccctgttctcatttccgatcgcgacgatacaagtcaggttgccagctgccgcagcagcagcagtgcccagcaccacgagttctgcacaaggtcccccagtaaaatgatatacattgacaccagtgaagatgcggccgtcgctagagagagctgcgctggcgacgctgtagtcttcagagatggggatgctgttgattgtagccgttgctctttcaatgagggtggattcttcttgagacaaaggcttggccatggtttagttcctcaccttgtcgtattatactatgccgatatactatgccgatgattaattgtcaacacgtgctgatcagatccgaaaatggatatacaagctcccgggagctttttgcaaaagcctaggcctccaaaaaagcctcctcactacttctggaatagctcagaggcagaggcggcctcggcctctgcataaataaaaaaaattagtcagccatggggcggagaatgggcggaactgggcggagttaggggcgggatgggcggagttaggggcgggactatggttgctgactaattgagatgcatgctttgcatacttctgcctgctggggagcctggggactttccacacctggttgctgactaattgagatgcatgctttgcatacttctgcctgctggggagcctggggactttccacaccctaactgacacacattccacagataacttcgtatagcatacattatacgaacggtagcctgggtcagtcgaagggggcggtcggtccatcatttgcggccgggtgatttttggggccgaaaagtgggaatttggggcccaatttggggcccaatttggggcccaatttgggttttcgaggggggatttttttagggggagattttgggtccccggaaaatggtgattttgggtcaaaaatggggattttggggtcgttttgaggtggggttttttggggtagaaatggcggtctgaggggaaaatgtcgttttggggccattttgggccatttgaggggaaatttgggtcaaaaaatgacgattttgggtcgttttagggaggaaaatgaatttagggcgatttgagccaaatttgggtcaaaaatggcgattttgagtcaaaaaatgattattttgggtcattttagggaggaaaatgaatttagggagattggacggcaaatttgggtcaaaaaatggtgattttgggtcaaaaaatgattattttgggtcattttagggagaaaaatgaatttagggagatttgagggcaaatttgggtcaaaaaatggtgattttgggtcaaaaaatgattattttgggtcattttagggagaaaaatgaatttagggagatttgagggcaaatttgggtcgaaaaatggcgattttgggtgaaaaatggacaattttgggtcattttagggttaaaaatgaatttagggagattggacggcaaatttgggtcaaaaaatggtgatttggggtcaaaaaataattattttgggtcattttagggataaaaaatgaatttagggagatttgagggcaaatttgggtcgaaaaatggtgatttggggtgaaaaatggacaattttgggtcattttagggataaaaaatgaatttagggcgatttgagccaaatttgggtcaaaaatggcgattttgagtcaaaaaatgattattttgggtcattttagggttaaaaatgaatttagggagattggacggcaaatttgggtcaaaaaatggtgattttcggtcaaaaaatgattattttgggtcattttagggagaaaaatgaatttagggagattggacggcaaatttgggtcgaaaaatggtgattttgggtcaaaaatggacaatttggggtcattttagggataaaaatgaatttagggagatttgagagcaaatttgggtctaaaaatgtcaatttggggtcaaaaatggtgattttgggtcattttagggatataaatgaattttgggagatttgagggcaaatttgggtcgaaaaatggtgatttggggtcaatttagggaggaaaatgaatttaaggtgatttgacggcaaatttgggttgaaaaatgacaatttggggtcattttaaagataaaatgaatttagggcgatttgagggcaaatttgggtcgaaaaatggtgatttgggtcaaaaaatgacaattttgggtcattttagggatataaatggacttagagcgatttgagggcaaatttggttgaaaaaatggacaatttgggtcattttagggatataaatgaatttagggagatttgatggcaaatttgggtcgaaaaatggtgatttgggtcaaaaatggtgattttggttgaaaaacagtcatttggggtcattttagggattaaaatgaatttcgggagatttgagggcaaatttgggtcaaaaaatggtgattttgggtcaattagtgataaaaaaatgaatttagggtgatttgagggcaaatttgggtcaaaaaatgacaatttggggtttttttagggaggagaatgaatttagggagttttgagggcaaatttgggtcaaaaaatagtgatttgggtcaaaagtggtgattttggttgaaaaacagtcattttgggtcattttagggagaaaaatgaatttcgggagatttgagggcaaatttgggtcaaaaaatgacaattttgggtcactttacgaattaaaatgaatttagggagatttgagggcaaatttgggtcaaaatatggtgattttgggtcaatttagggaggaaaatgaatttagggcgatttgaaggcaaatttgggtcgaaaatggtgattttgggtcaaaaaatgatgattttgggtcgttttagggagaaaatgaatttagggagatttgagggcaaatttgggtcaaaaaatggtgattttgggtcattgtagggataaaaatgaatttggggcgatttgagggcaaatttgggtggaaaatggacaattttgggtcattttagggagaaaaatgaatttagggagatttgagggcaaatttgggtcaaaaaatggtgatttggggtcattttcagaagaaaaaatgattattttccccactaaaaatgtatattttggggccaaatggtgaaaaatggtgatttttaatcaaacgtccccaaaattggggaaatttcatcgatttgacccaaaattgagttttttttccctgttaaaaatgtacattttggggtcaatcgctgaaatgttcccacttttcacttctttgcccccaaattttgctgtccggtgagaaattaattaattaatgatcattaattgatcgacaattaatggttattaattaattaataggtcctcttttggtgactccttcgcttttggggccaaaagtccataaattggccccaaaaaattaacgctgagtaattggattccaaagtattaatgataaacattaaaagtgtttaattaataatgatattaaacataatttcgtttttattatcgatttatcaacaacgatgaacgataatactttacaacaatcgctaataattaattaattatttaattaattaatttctaataattacttcgcattatcggacacgagatgttgtaattattaataatttaattcctaataattagaagattcgttgaaaatggtacttatctttacaaataatcacttctaataataatgattaataatagttaataacaacaatgacgataatgacgataatattaataatatgtgatatatttaatataaaattcgtattaatatattatatctacaaaatatgatataaaatataatattttatttatatataacacaatttattattattatcattattatcattattaatatcatcattattaacgttatcgaaatacttatttagaaataataaaaacggatttaatgatggcaacaaaaatattttattaatgttaaaaaaaaataattaataatttccaaagattcgaattcggggcaacgaacggcactcgataatttttaattaattaatagtttgaattaatcggtactttttaatcctccattttgcccgaaatcgccgttttttgccccaaattccccaccgcggcgttaaaaacataaagaaattaagcatcaaaagtgcccttttttggggttgttttgacccaaaaaaaaaatggccgaattgggggcggccgttttacggttgggttcattttgggttcaaaacagccaaaaatgggaactttgggtttcgaaaacaacaacaacaaaaaaacgggtttattttgggctcattttgggtgtttttgggtcaggaggagaaaaaataggaagtttgagagcgaaacaacggccgcttttggggggaaaacggccctttttggtcaacggcgggggaaaaaaaaaagcggagtttttggggtgaaaaagagcggttttgggtaaatttgggttttggggtaaaagtggaggattttgggcaatgggagttaaaaaatgggtgtttttatgggggttcggtgcagtttttcctgtttgatggggggtttattaatccggggggggggattaatgagaattaataatgttaatagaaatatctgggaaattaatagcaattattaattgttaatagttattaatagttctatatatctcacatctacgatacaatataatatcgttacaatcatatagtcgatatattacatataattatcagtaataataataagtaacaataattagcagtaattaataataataattaatagtattcgttaataagattattgataataattaagtagtagcgattaatagagatgggatttcgtgagaaatggaccaaatttgggccgttttgacccaaatttttggtggttttttttccgattctttgtgaatttcgggtcggattcatcagcaattaattacggttattaggggctattagaggcttttaattgggattattagagacttttaagcggatttggggacttttaagtggattttatgattcttaagtggattttgggtggattttaccgcttttgccagcttttgttccctttagtgagggttaatttcgagcttggcgtaatcatggtcatagctgtttcctgtgtgaaattgttatccgctcacaattccacacaacatacgagccggaagcataaagtgtaaagcctggggtgcctaatgagtgagctaactcacattaattgcgttgcgctcactgcccgctttccagtcgggaaacctgtcgtgccagctgcattaatgaatcggccaacgcgcggggagaggcggtttgcgtattgggcgctcttccgcttcctcgctcactgactcgctgcgctcggtcgttcggctgcggcgagcggtatcagctcactcaaaggcggtaatacggttatccacagaatcaggggataacgcaggaaagaacatgtgagcaaaaggccagcaaaaggccaggaaccgtaaaaaggccgcgttgctggcgtttttccataggctccgcccccctgacgagcatcacaaaaatcgacgctcaagtcagaggtggcgaaacccgacaggactataaagataccaggcgtttccccctggaagctccctcgtgcgctctcctgttccgaccctgccgcttaccggatacctgtccgcctttctcccttcgggaagcgtggcgctttctcatagctcacgctgtaggtatctcagttcggtgtaggtcgttcgctccaagctgggctgtgtgcacgaaccccccgttcagcccgaccgctgcgccttatccggtaactatcgtcttgagtccaacccggtaagacacgacttatcgccactggcagcagccactggtaacaggattagcagagcgaggtatgtaggcggtgctacagagttcttgaagtggtggcctaactacggctacactagaaggacagtatttggtatctgcgctctgctgaagccagttaccttcggaaaaagagttggtagctcttgatccggcaaacaaaccaccgctggtagcggtggtttttttgtttgcaagcagcagattacgcgcagaaaaaaaggatctcaagaagatcctttgatcttttctacggggtctgacgctcagtggaacgaaaactcacgttaagggattttggtcatgagattatcaaaaaggatcttcacctagatccttttaaattaaaaatgaagttttaaatcaatctaaagtatatatgagtaaacttggtctgacagttaccaatgcttaatcagtgaggcacctatctcagcgatctgtctatttcgttcatccatagttgcctgactccccgtcgtgtagataactacgatacgggagggcttaccatctggccccagtgctgcaatgataccgcgagacccacgctcaccggctccagatttatcagcaataaaccagccagccggaagggccgagcgcagaagtggtcctgcaactttatccgcctccatccagtctattaattgttgccgggaagctagagtaagtagttcgccagttaatagtttgcgcaacgttgttgccattgctacaggcatcgtggtgtcacgctcgtcgtttggtatggcttcattcagctccggttcccaacgatcaaggcgagttacatgatcccccatgttgtgcaaaaaagcggttagctccttcggtcctccgatcgttgtcagaagtaagttggccgcagtgttatcactcatggttatggcagcactgcataattctcttactgtcatgccatccgtaagatgcttttctgtgactggtgagtactcaaccaagtcattctgagaatagtgtatgcggcgaccgagttgctcttgcccggcgtcaatacgggataataccgcgccacatagcagaactttaaaagtgctcatcattggaaaacgttcttcggggcgaaaactctcaaggatcttaccgctgttgagatccagttcgatgtaacccactcgtgcacccaactgatcttcagcatcttttactttcaccagcgtttctgggtgagcaaaaacaggaaggcaaaatgccgcaaaaaagggaataagggcgacacggaaatgttgaatactcatactcttcctttttcaatattattgaagcatttatcagggttattgtctcatgagcggatacatatttgaatgtatttagaaaaataaacaaataggggttccgcgcacatttccccgaaaagtgc

SEQ ID NO: 64 - DNA, 7433 bp, Homo sapiens
ctcgagagctcatgcggtaccgctagcgtttaaacctagtcactcctctacgctcctgtacatacgaggtgcagctgttggagtctgggggaggcttggtacagcctggggggtccctgagactctcctgtgcagcctctggattcacctttagcggctactatatgcactgggtccgccaggctccagggaaggggctggagtgggtctcatggatcaaccctaacagtggtggcacaaactatgcacagaagtttcagggccggttcaccatctccagagacaattccaagaacacgctgtatctgcaaatgaacagcctgagagccgaggacacggccgtatattactgtgcgaaaggttggggctatacggtgactaccctcaactggttcgacccctggggccagggcaccctggtcaccgtctcctcagtgcctggtgactcttccgcaatcagtcctgggacagaaacctcagggacagcctttatgagttttgatcacatctaacagagaggatgggccagcgtgtctctactcgcgtgtctctctatgcggaggtgcagctgttggagtctgggggaggcttggtacagcctggggggtccctgagactctcctgtgcagcctctggattcacctttagcagttatgatatcaactgggtccgccaggctccagggaaggggctggagtgggtctcatggatgaaccctaacagtggtaacacaggctatgcacagaagttccagggccggttcaccatctccagagacaattccaagaacacgctgtatctgcaaatgaacagcctgagagccgaggacacggccgtatattactgtgcgaaatccagcagctggcactactactacggtatggacgtctggggccagggcaccctggtcaccgtctcctcagtgcctggtgactcttccgcaatcagtcctgggacagaaacctcagggacagcctttatgagttttgatcacatctaacagagaggatgggccagatacgacgtatcacgtactacgtctagtacgaggtgcagctgttggagtctgggggaggcttggtacagcctggggggtccctgagactctcctgtgcagcctctggattcacctttagcgaattatccatgcactgggtccgccaggctccagggaaggggctggagtgggtctcaggttttgatcctgaagatggtgaaacaatctacgcacagaagttccagggccggttcaccatctccagagacaattccaagaacacgctgtatctgcaaatgaacagcctgagagccgaggacacggccgtatattactgtgcgaaaggaacctactactactactacggtatggacgtctggggccagggcaccctggtcaccgtctcctcagtgcctggtgactcttccgcaatcagtcctgggacagaaacctcagggacagcctttatgagttttgatcacatctaacagagaggatgggccagcgtagactagtacgagtatgtactctcgtggaggtgcagctgttggagtctgggggaggcttggtacagcctggggggtccctgagactctcctgtgcagcctctggattcacctttagcagctactatatgcactgggtccgccaggctccagggaaggggctggagtgggtctcaataatcaaccctagtggtggtagcacaagctacgcacagaagttccagggccggttcaccatctccagagacaattccaagaacacgctgtatctgcaaatgaacagcctgagagccgaggacacggccgtatattactgtgcgaaaagtttcagcagcagctggtacaactggttcgacccctggggccagggcaccctggtcaccgtctcctcagtgcctggtgactcttccgcaatcagtcctgggacagaaacctcagggacagcctttatgagttttgatcacatctaacagagaggatgggccagacgcgagtatactactatgtactgtacagtgaggtgcagctgttggagtctgggggaggcttggtacagcctggggggtccctgagactctcctgtgcagcctctggattcacctttagcagctatgctatcagctgggtccgccaggctccagggaaggggctggagtgggtctcagggatcatccctatctttggtacagcaaactacgcacagaagttccagggccggttcaccatctccagagacaattccaagaacacgctgtatctgcaaatgaacagcctgagagccgaggacacggccgtatattactgtgcgaaagggtccgtcctcggtgatgcttttgatatctggggccagggcaccctggtcaccgtctcctcagtgcctggtgactcttccgcaatcagtcctgggacagaaacctcagggacagcctttatgagttttgatcacatctaacagagaggatgggccagatagagtactcacgctacgtcagtagacgtgaggtgcagctgttggagtctgggggaggcttggtacagcctggggggtccctgagactctcctgtgcagcctctggattcacctttagcaatgctagaatgggtgtgagctgggtccgccaggctccagggaaggggctggagtgggtctcacacattttttcgaatgacgaaaaatcctacagcacatctctgaagagccggttcaccatctccagagacaattccaagaacacgctgtatctgcaaatgaacagcctgagagccgaggacacggccgtatattactgtgcgaaaatcccgtatgaagcagtggctggctactttgactactggggccagggcaccctggtcaccgtctcctcagtgcctggtgactcttccgcaatcagtcctgggacagaaacctcagggacagcctttatgagttttgatcacatctaacagagaggatgggccagtacgctgtcttagtgtagattcgatcacgtgaggtgcagctgttggagtctgggggaggcttggtacagcctggggggtccctgagactctcctgtgcagcctctggattcacctttagcagctattggatgagctgggtccgccaggctccagggaaggggctggagtgggtctcaaacataaagcaagatggaagtgagaaatactatgtggactctgtgaagggccggttcaccatctccagagacaattccaagaacacgctgtatctgcaaatgaacagcctgagagccgaggacacggccgtatattactgtgcgaaagttacggtgaccgggacctggtacttcgatctctggggccagggcaccctggtcaccgtctcctcagtgcctggtgactcttccgcaatcagtcctgggacagaaacctcagggacagcctttatgagttttgatcacatctaacagagaggatgggccagtgacgtatgttgtgagtagtacagtatatagaggtgcagctgttggagtctgggggaggcttggtacagcctggggggtccctgagactctcctgtgcagcctctggattcacctttagcagctacgacatgcactgggtccgccaggctccagggaaggggctggagtgggtctcagctattggtactgctggtgacacatactatccaggctccgtgaagggccggttcaccatctccagagacaattccaagaacacgctgtatctgcaaatgaacagcctgagagccgaggacacggccgtatattactgtgcgaaagcggatacagctatggtcatttactactactactacggtatggacgtctggggccagggcaccctggtcaccgtctcctcagtgcctggtgactcttccgcaatcagtcctgggacagaaacctcagggacagcctttatgagttttgatcacatctaacagagaggatgggccagagtatacataagtcgagagaagtgctacgagaggtgcagctgttggagtctgggggaggcttggtacagcctggggggtccctgagactctcctgtgcagcctctggattcacctttagcagctatagcatgaactgggtccgccaggctccagggaaggggctggagtgggtctcatccattagtagtagtagtagttacatatactacgcagactcagtgaagggccggttcaccatctccagagacaattccaagaacacgctgtatctgcaaatgaacagcctgagagccgaggacacggccgtatattactgtgcgaaagagaatagtggctatgattactttgactactggggccagggcaccctggtcaccgtctcctcagtgcctggtgactcttccgcaatcagtcctgggacagaaacctcagggacagcctttatgagttttgatcacatctaacagagaggatgggccagcgtacagtcacgtactcagactacgctctagaggtgcagctgttggagtctgggggaggcttggtacagcctggggggtccctgagactctcctgtgcagcctctggattcacctttagcgattatgctatgagctgggtccgccaggctccagggaaggggctggagtgggtctcattcattagaagcaaagcttatggtgggacaacagaatacaccgcgtctgtgaaaggccggttcaccatctccagagacaattccaagaacacgctgtatctgcaaatgaacagcctgagagccgaggacacggccgtatattactgtgcgaaagatctaggtagtggctttgactactggggccagggcaccctggtcaccgtctcctcagtgcctggtgactcttccgcaatcagtcctgggacagaaacctcagggacagcctttatgagttttgatcacatctaacagagaggatgggccagtatatatacatatgctagtatcacgcgagagaggtgcagctgttggagtctgggggaggcttggtacagcctggggggtccctgagactctcctgtgcagcctctggattcacctttagcgaccactacatggactgggtccgccaggctccagggaaggggctggagtgggtctcacgtactagaaacaaagctaacagttacaccacagaatacgccgcgtctgtgaaaggccggttcaccatctccagagacaattccaagaacacgctgtatctgcaaatgaacagcctgagagccgaggacacggccgtatattactgtgcgaaaggaggccaggggagccgatactactactactacggtatggacgtctggggccagggcaccctggtcaccgtctcctcagtgcctggtgactcttccgcaatcagtcctgggacagaaacctcagggacagcctttatgagttttgatcacatctaacagagaggatgggccagtgagtcagtatgtagtgtgatgtcacacgagaggtgcagctgttggagtctgggggaggcttggtacagcctggggggtccctgagactctcctgtgcagcctctggattcacctttagcagcaatgagatgagctgggtccgccaggctccagggaaggggctggagtgggtctcatccattagtggtggtagcacatactacgcagactccaggaagggccggttcaccatctccagagacaattccaagaacacgctgtatctgcaaatgaacagcctgagagccgaggacacggccgtatattactgtgcgaaagactcatatgatgcttttgatatctggggccagggcaccctggtcaccgtctcctcagtgcctggtgactcttccgcaatcagtcctgggacagaaacctcagggacagcctttatgagttttgatcacatctaacagagaggatgggccagacatgacgacacgacagctcacgtctcatcgaggtgcagctgttggagtctgggggaggcttggtacagcctggggggtccctgagactctcctgtgcagcctctggattcacctttagcagtggtggttactcctggagctgggtccgccaggctccagggaaggggctggagtgggtctcatacatctatcatagtgggagcacctactacaacccgtccctcaagagtcggttcaccatctccagagacaattccaagaacacgctgtatctgcaaatgaacagcctgagagccgaggacacggccgtatattactgtgcgaaagatgcgagtaaccatttctttgactactggggccagggcaccctggtcaccgtctcctcagtgcctggtgactcttccgcaatcagtcctgggacagaaacctcagggacagcctttatgagttttgatcacatctaacagagaggatgggccagagcgactagcagtagtgatcagtgacacacgaggtgcagctgttggagtctgggggaggcttggtacagcctggggggtccctgagactctcctgtgcagcctctggattcacctttagcagtagtagttactactggggctgggtccgccaggctccagggaaggggctggagtgggtctcaagtatctattatagtgggagcacctactacaacccgtccctcaagagtcggttcaccatctccagagacaattccaagaacacgctgtatctgcaaatgaacagcctgagagccgaggacacggccgtatattactgtgcgaaaaaggactggaacgacaactggttcgacccctggggccagggcaccctggtcaccgtctcctcagtgcctggtgactcttccgcaatcagtcctgggacagaaacctcagggacagcctttatgagttttgatcacatctaacagagaggatgggccagatctactgaccacgtagatccacgtgtcgcgaggtgcagctgttggagtctgggggaggcttggtacagcctggggggtccctgagactctcctgtgcagcctctggattcacctttagcagcaacagtgctgcttggaactgggtccgccaggctccagggaaggggctggagtgggtctcaaggacatactacaggtccaagtggtataatgattatgcagtatctgtgaaaagtcggttcaccatctccagagacaattccaagaacacgctgtatctgcaaatgaacagcctgagagccgaggacacggccgtatattactgtgcgaaagatattgtagtagtaccagctgctatatactggtacttcgatctctggggccagggcaccctggtcaccgtctcctcagtgcctggtgactcttccgcaatcagtcctgggacagaaacctcagggacagcctttatgagttttgatcacatctaacagagaggatgggccaggtttaaacggtacctggccaggatccatgcccatggccgcggatgcggcgcgccatcgatatgcgtcgacatttaaat

SEQ ID NO: 65 - DNA, 29 bp, Artificial Sequence
  Synthetic DNA
gttaactcgagatgcgtcgacatttaaat

SEQ ID NO: 66 - DNA, 16247 bp, Artificial Sequence
  Targeting vector
tcgcgcgtttcggtgatgacggtgaaaacctctgacacatgcagctcccggagacggtcacagcttgtctgtaagcggatgccgggagcagacaagcccgtcagggcgcgtcagcgggtgttggcgggtgtcggggctggcttaactatgcggcatcagagcagattgtactgagagtgcaccatatgcggtgtgaaataccgcacagatgcgtaaggagaaaataccgcatcaggcgccattcgccattcaggctgcgcaactgttgggaagggcgatcggtgcgggcctcttcgctattacgccagctggcgaaagggggatgtgctgcaaggcgattaagttgggtaacgccagggttttcccagtcacgacgttgtaaaacgacggccagtttcccgaagcgaaagccgcgtgttatttttgggtgggaaagccccgattcgctcctttttttttatttattatttttgttgtttttcgtgtctttttcttctccgttttgcagctgcggcctccaggtgtccccggccgtggtatttttgggtcgaaaaagccgctttttggctcacttggaaacctttcgggcgtctccaagcggagcgttggcgggaaatggtgttttttttgggttgttttcggtcccttttttcaccatttttgtggtttttcggcccattttcggcctcccccccccccccccccttcccgtggggctgcgctccgtggagcggaatggggtcgttaattaaggttaattggtttaattaatgggccgtgcagggagaagagggccgtgcggtggttgttagccctgattaatggcttggttgaggggagagtgtaattaagtgcttcgttagcactaattaatggcttgattgagaggagagtgtaattaaatgcttcataatccctaattaatggcttggttgagacaagagtgtaattaagtgcttcattagccctgattaatggcttggttgaggggagagtgtaattaaatgcttcgttagcactaattaatggcttgattgagaggagagtgtaattaaatgcttcataatccctaattaatggcttggttgagacaagagtgtaattaagtgcttcattagccctgattaatggcttggttgagaggagagtgtaattaaatgcttcattatccctaattagggactgaattccaaggagagtgtaattaagtgcttcattatccctaattaatggcttggttgagaggagagtgtaattaaatgctttgttagccctaattaatggtttgatggagaggagagtgtaattaagtgcttcattatccctaattaatggcttggttgaggggagagtgtaattaaatgcttagttagccctaattaatggcttggttgagaggagagtgtaattgaatgcttcattatccctaattagggattgaattgagaggagagtgtaattgaatgctttgttagccctaattagggattgaattgagaggagagtgtaattaaatgcctcattatccctaattagggattgaattgagaggagagtttaattaaatgcctcattatccctaattagggactgaattccgacgagagtgtaattaagtgcttcatttagccctaattaatggcttgattgagaggagagtgtaattaaatgcttcattatccctaattagggattgaattgagaggagagtgtaattaaatgcttcattatccctaattagggattgaattgagaggagagtgtaattaaatgcttcattatccctaattaatggcttggttgagaggggagtgtaattaagtgcttcgttatccctaattagggattgaattgtgaggagatggcaattaatacttcattatccctaattaatttaattagtccctattatccctaatttaattcatggtttggttgatggaagaatgtaattaaatgctttgttatccctaattaatggtttgattgagcggagagtgtaattaaatgcttcattatcccttattaatggttgtgtggaatgtagtgtaattagaagtccctaattaatggtttaattgagagaagactgcaattagatgactcatagcccctaataagtggtttaattatgagataatcacaattacatgtttcattgtccctaattaatcgtttaattgcgagaagatcacaattaattaaatgatccctaattgctaccgttcgtataatgtatactatacgaagttattttatttgtgaaatttgtgatgctattgctttatttgtaaccattataagctgcaataaacaagttggggtgggcgaagaactccagcatgagatccccgcgctggaggatcatccagccggcgtcccggaaaacgattccgaagcccaacctttcatagaaggcggcggtggaatcgaaatctcgtgatggcaggttgggcgtcgcttggtcggtcatttcgaaccccagagtcccgctcagaagaactcgtcaagaaggcgatagaaggcgatgcgctgcgaatcgggagcggcgataccgtaaagcacgaggaagcggtcagcccattcgccgccaagctcttcagcaatatcacgggtagccaacgctatgtcctgatagcggtccgccacacccagccggccacagtcgatgaatccagaaaagcggccattttccaccatgatattcggcaagcaggcatcgccatgggtcacgacgagatcctcgccgtcgggcatgcgcgccttgagcctggcgaacagttcggctggcgcgagcccctgatgctcttcgtccagatcatcctgatcgacaagaccggcttccatccgagtacgtgctcgctcgatgcgatgtttcgcttggtggtcgaatgggcaggtagccggatcaagcgtatgcagccgccgcattgcatcagccatgatggatactttctcggcaggagcaaggtgagatgacaggagatcctgccccggcacttcgcccaatagcagccagtcccttcccgcttcagtgacaacgtcgagcacagctgcgcaaggaacgcccgtcgtggccagccacgatagccgcgctgcctcgtcctgcagttcattcagggcaccggacaggtcggtcttgacaaaaagaaccgggcgcccctgcgctgacagccggaacacggcggcatcagagcagccgattgtctgttgtgcccagtcatagccgaatagcctctccacccaagcggccggagaacctgcgtgcaatccatcttgttcaatcatgcgaaacgatcctcatcctgtctcttgatcagatccgaaaatggatatacaagctcccgggagctttttgcaaaagcctaggcctccaaaaaagcctcctcactacttctggaatagctcagaggcagaggcggcctcggcctctgcataaataaaaaaaattagtcagccatggggcggagaatgggcggaactgggcggagttaggggcgggatgggcggagttaggggcgggactatggttgctgactaattgagatgcatgctttgcatacttctgcctgctggggagcctggggactttccacacctggttgctgactaattgagatgcatgctttgcatacttctgcctgctggggagcctggggactttccacaccctaaataacttcgtataatgtatactatacgaacggtagcgttaacaagcttctgtggaatgtgtgtcagttagggtgtggaaagtccccaggctccccaggcaggcagaagtatgcaaagcatgcatctcaattagtcagcaaccaggtgtggaaagtccccaggctccccagcaggcagaagtatgcaaagcatgcatctcaattagtcagcaaccatagtcccgcccctaactccgcccatcccgcccctaactccgcccagttccgcccattctccgccccatggctgactaattttttttatttatgcagaggccgaggccgcctctgcctctgagctattccagaagtagtgaggaggcttttttggaggcctaggcttttgcaaaaagctataacttcgtatatggtattatatacgaagttatcccaccccaacttgtttattgcagcttataatggttacaaataaagcaatagcatcacaaatttcacaaataaagcatttttttcactgcattctagttgtggtttgtccaaactcatcaatgtatcttatcatgtctgtataccgtcgacctctagctagagcttggcgtaatcatggtcatagctgtttcctgtgtgcccaccccaacttgtttattgcagcttataatggttacaaataaagcaatagcatcacaaatttcacaaataaagcatttttttcactgcattctagttgtggtttgtccaaactcatcaatgtatcttatcatgtctggagctcgctagcgtttaaacggtaccataacttcgtatattctatcttatacgaacggtactcgagagctcatgcggtaccgctagcgtttaaacctagtcactcctctacgctcctgtacatacgaggtgcagctgttggagtctgggggaggcttggtacagcctggggggtccctgagactctcctgtgcagcctctggattcacctttagcggctactatatgcactgggtccgccaggctccagggaaggggctggagtgggtctcatggatcaaccctaacagtggtggcacaaactatgcacagaagtttcagggccggttcaccatctccagagacaattccaagaacacgctgtatctgcaaatgaacagcctgagagccgaggacacggccgtatattactgtgcgaaaggttggggctatacggtgactaccctcaactggttcgacccctggggccagggcaccctggtcaccgtctcctcagtgcctggtgactcttccgcaatcagtcctgggacagaaacctcagggacagcctttatgagttttgatcacatctaacagagaggatgggccagcgtgtctctactcgcgtgtctctctatgcggaggtgcagctgttggagtctgggggaggcttggtacagcctggggggtccctgagactctcctgtgcagcctctggattcacctttagcagttatgatatcaactgggtccgccaggctccagggaaggggctggagtgggtctcatggatgaaccctaacagtggtaacacaggctatgcacagaagttccagggccggttcaccatctccagagacaattccaagaacacgctgtatctgcaaatgaacagcctgagagccgaggacacggccgtatattactgtgcgaaatccagcagctggcactactactacggtatggacgtctggggccagggcaccctggtcaccgtctcctcagtgcctggtgactcttccgcaatcagtcctgggacagaaacctcagggacagcctttatgagttttgatcacatctaacagagaggatgggccagatacgacgtatcacgtactacgtctagtacgaggtgcagctgttggagtctgggggaggcttggtacagcctggggggtccctgagactctcctgtgcagcctctggattcacctttagcgaattatccatgcactgggtccgccaggctccagggaaggggctggagtgggtctcaggttttgatcctgaagatggtgaaacaatctacgcacagaagttccagggccggttcaccatctccagagacaattccaagaacacgctgtatctgcaaatgaacagcctgagagccgaggacacggccgtatattactgtgcgaaaggaacctactactactactacggtatggacgtctggggccagggcaccctggtcaccgtctcctcagtgcctggtgactcttccgcaatcagtcctgggacagaaacctcagggacagcctttatgagttttgatcacatctaacagagaggatgggccagcgtagactagtacgagtatgtactctcgtggaggtgcagctgttggagtctgggggaggcttggtacagcctggggggtccctgagactctcctgtgcagcctctggattcacctttagcagctactatatgcactgggtccgccaggctccagggaaggggctggagtgggtctcaataatcaaccctagtggtggtagcacaagctacgcacagaagttccagggccggttcaccatctccagagacaattccaagaacacgctgtatctgcaaatgaacagcctgagagccgaggacacggccgtatattactgtgcgaaaagtttcagcagcagctggtacaactggttcgacccctggggccagggcaccctggtcaccgtctcctcagtgcctggtgactcttccgcaatcagtcctgggacagaaacctcagggacagcctttatgagttttgatcacatctaacagagaggatgggccagacgcgagtatactactatgtactgtacagtgaggtgcagctgttggagtctgggggaggcttggtacagcctggggggtccctgagactctcctgtgcagcctctggattcacctttagcagctatgctatcagctgggtccgccaggctccagggaaggggctggagtgggtctcagggatcatccctatctttggtacagcaaactacgcacagaagttccagggccggttcaccatctccagagacaattccaagaacacgctgtatctgcaaatgaacagcctgagagccgaggacacggccgtatattactgtgcgaaagggtccgtcctcggtgatgcttttgatatctggggccagggcaccctggtcaccgtctcctcagtgcctggtgactcttccgcaatcagtcctgggacagaaacctcagggacagcctttatgagttttgatcacatctaacagagaggatgggccagatagagtactcacgctacgtcagtagacgtgaggtgcagctgttggagtctgggggaggcttggtacagcctggggggtccctgagactctcctgtgcagcctctggattcacctttagcaatgctagaatgggtgtgagctgggtccgccaggctccagggaaggggctggagtgggtctcacacattttttcgaatgacgaaaaatcctacagcacatctctgaagagccggttcaccatctccagagacaattccaagaacacgctgtatctgcaaatgaacagcctgagagccgaggacacggccgtatattactgtgcgaaaatcccgtatgaagcagtggctggctactttgactactggggccagggcaccctggtcaccgtctcctcagtgcctggtgactcttccgcaatcagtcctgggacagaaacctcagggacagcctttatgagttttgatcacatctaacagagaggatgggccagtacgctgtcttagtgtagattcgatcacgtgaggtgcagctgttggagtctgggggaggcttggtacagcctggggggtccctgagactctcctgtgcagcctctggattcacctttagcagctattggatgagctgggtccgccaggctccagggaaggggctggagtgggtctcaaacataaagcaagatggaagtgagaaatactatgtggactctgtgaagggccggttcaccatctccagagacaattccaagaacacgctgtatctgcaaatgaacagcctgagagccgaggacacggccgtatattactgtgcgaaagttacggtgaccgggacctggtacttcgatctctggggccagggcaccctggtcaccgtctcctcagtgcctggtgactcttccgcaatcagtcctgggacagaaacctcagggacagcctttatgagttttgatcacatctaacagagaggatgggccagtgacgtatgttgtgagtagtacagtatatagaggtgcagctgttggagtctgggggaggcttggtacagcctggggggtccctgagactctcctgtgcagcctctggattcacctttagcagctacgacatgcactgggtccgccaggctccagggaaggggctggagtgggtctcagctattggtactgctggtgacacatactatccaggctccgtgaagggccggttcaccatctccagagacaattccaagaacacgctgtatctgcaaatgaacagcctgagagccgaggacacggccgtatattactgtgcgaaagcggatacagctatggtcatttactactactactacggtatggacgtctggggccagggcaccctggtcaccgtctcctcagtgcctggtgactcttccgcaatcagtcctgggacagaaacctcagggacagcctttatgagttttgatcacatctaacagagaggatgggccagagtatacataagtcgagagaagtgctacgagaggtgcagctgttggagtctgggggaggcttggtacagcctggggggtccctgagactctcctgtgcagcctctggattcacctttagcagctatagcatgaactgggtccgccaggctccagggaaggggctggagtgggtctcatccattagtagtagtagtagttacatatactacgcagactcagtgaagggccggttcaccatctccagagacaattccaagaacacgctgtatctgcaaatgaacagcctgagagccgaggacacggccgtatattactgtgcgaaagagaatagtggctatgattactttgactactggggccagggcaccctggtcaccgtctcctcagtgcctggtgactcttccgcaatcagtcctgggacagaaacctcagggacagcctttatgagttttgatcacatctaacagagaggatgggccagcgtacagtcacgtactcagactacgctctagaggtgcagctgttggagtctgggggaggcttggtacagcctggggggtccctgagactctcctgtgcagcctctggattcacctttagcgattatgctatgagctgggtccgccaggctccagggaaggggctggagtgggtctcattcattagaagcaaagcttatggtgggacaacagaatacaccgcgtctgtgaaaggccggttcaccatctccagagacaattccaagaacacgctgtatctgcaaatgaacagcctgagagccgaggacacggccgtatattactgtgcgaaagatctaggtagtggctttgactactggggccagggcaccctggtcaccgtctcctcagtgcctggtgactcttccgcaatcagtcctgggacagaaacctcagggacagcctttatgagttttgatcacatctaacagagaggatgggccagtatatatacatatgctagtatcacgcgagagaggtgcagctgttggagtctgggggaggcttggtacagcctggggggtccctgagactctcctgtgcagcctctggattcacctttagcgaccactacatggactgggtccgccaggctccagggaaggggctggagtgggtctcacgtactagaaacaaagctaacagttacaccacagaatacgccgcgtctgtgaaaggccggttcaccatctccagagacaattccaagaacacgctgtatctgcaaatgaacagcctgagagccgaggacacggccgtatattactgtgcgaaaggaggccaggggagccgatactactactactacggtatggacgtctggggccagggcaccctggtcaccgtctcctcagtgcctggtgactcttccgcaatcagtcctgggacagaaacctcagggacagcctttatgagttttgatcacatctaacagagaggatgggccagtgagtcagtatgtagtgtgatgtcacacgagaggtgcagctgttggagtctgggggaggcttggtacagcctggggggtccctgagactctcctgtgcagcctctggattcacctttagcagcaatgagatgagctgggtccgccaggctccagggaaggggctggagtgggtctcatccattagtggtggtagcacatactacgcagactccaggaagggccggttcaccatctccagagacaattccaagaacacgctgtatctgcaaatgaacagcctgagagccgaggacacggccgtatattactgtgcgaaagactcatatgatgcttttgatatctggggccagggcaccctggtcaccgtctcctcagtgcctggtgactcttccgcaatcagtcctgggacagaaacctcagggacagcctttatgagttttgatcacatctaacagagaggatgggccagacatgacgacacgacagctcacgtctcatcgaggtgcagctgttggagtctgggggaggcttggtacagcctggggggtccctgagactctcctgtgcagcctctggattcacctttagcagtggtggttactcctggagctgggtccgccaggctccagggaaggggctggagtgggtctcatacatctatcatagtgggagcacctactacaacccgtccctcaagagtcggttcaccatctccagagacaattccaagaacacgctgtatctgcaaatgaacagcctgagagccgaggacacggccgtatattactgtgcgaaagatgcgagtaaccatttctttgactactggggccagggcaccctggtcaccgtctcctcagtgcctggtgactcttccgcaatcagtcctgggacagaaacctcagggacagcctttatgagttttgatcacatctaacagagaggatgggccagagcgactagcagtagtgatcagtgacacacgaggtgcagctgttggagtctgggggaggcttggtacagcctggggggtccctgagactctcctgtgcagcctctggattcacctttagcagtagtagttactactggggctgggtccgccaggctccagggaaggggctggagtgggtctcaagtatctattatagtgggagcacctactacaacccgtccctcaagagtcggttcaccatctccagagacaattccaagaacacgctgtatctgcaaatgaacagcctgagagccgaggacacggccgtatattactgtgcgaaaaaggactggaacgacaactggttcgacccctggggccagggcaccctggtcaccgtctcctcagtgcctggtgactcttccgcaatcagtcctgggacagaaacctcagggacagcctttatgagttttgatcacatctaacagagaggatgggccagatctactgaccacgtagatccacgtgtcgcgaggtgcagctgttggagtctgggggaggcttggtacagcctggggggtccctgagactctcctgtgcagcctctggattcacctttagcagcaacagtgctgcttggaactgggtccgccaggctccagggaaggggctggagtgggtctcaaggacatactacaggtccaagtggtataatgattatgcagtatctgtgaaaagtcggttcaccatctccagagacaattccaagaacacgctgtatctgcaaatgaacagcctgagagccgaggacacggccgtatattactgtgcgaaagatattgtagtagtaccagctgctatatactggtacttcgatctctggggccagggcaccctggtcaccgtctcctcagtgcctggtgactcttccgcaatcagtcctgggacagaaacctcagggacagcctttatgagttttgatcacatctaacagagaggatgggccaggtttaaacggtacctggccaggatccatgcccatggccgcggatgcggcgcgccatcgatatgcgtcgacatttaaatgttggcgcagaagggattcatatcaattaattccctgtcctcaattaatgcataattgggagtgcgatggaatcattcaataagtaatgaggacttggtgtcaaaatgccaattaagtaattaatgacacccaattaatacacaatggggattacagtggaataactcagtgaagttcatatctaaattgcaattgaataattaattacagctaattaatggatgggagactggcagtggtataacttaatgaaggaacacagtgaattcctgtctgaattgaaattaattgatttattagggctaattaatgaatggtggggttaaaaatagcattactcagcgaaggaacatgagttcatggctaaattgagattgaattattaattacaactaattgattaatgactgatgggagtaagaatggaataactcagtgaaggaacacaatggattcatggcctaattgaaattaaatggttaattagagctaattaatgaatgatggggggtggcaatggaatgatacaagaaagaaacacaatgggttcgtgtctacattgaaattaaataattaattacagctaattaataaacggcgaggttgacaatggtataactgtgaagagacagaatgagttcgtgactaaattggtattaaatgattaattagagctaattaacaggtggtggggctgagaatggcataactcaatgggggatgatgagctgatggcttaattggaattaataattaatcacaaccaattaacaggtgctgttaatggggttacaggggcatgacttcaggaagaagcacaaagtggccattaaataattaattgcacccaattaattcctgatggggattactgcagaggaactcagcgaaggattcaagcagaaatgacacagttaggttgctcaattgcgttaattaattaaaatcgctaattaggtgagcttcattaaggcctgatggggttcatcccaacgctgggatcaaagaactcagcgcagagtggataacgataattagaaggggacaaattaatgaggaaacacgactttgggcctagacggccattaaatcattaatcaacccgacgggcgcccaattaatcataaagttattaagcaattaagtcgaggctgacgagaaaccgcaacgagagccctccacgctcctttgagttggcgcaaacaacaaacaacgcgggctcgttaagcagcgacgacgccgagcgtaacgaagcaatccccgcgcccgacaattaacgcgctaacgaagccggagccctccttatgcaaattagcccctccagagggccataaaagcgccggctctccgacggcgcgggaggagcaccagtcggctccgcaaccatgagcccactcgtctcctccctcctgctcctggccgccctgccaggtgagggcgctgtggggctctatggggctctatggggtctcagcggggctctgcgggctcaatgggggccaaagggggggtctgcgggctctatgggggggtcaacggggggtctcacggggggccggctccgcgaggccgtgtggcggcggctccgtcagcgctctctgggcgcgcctccttccccacagggctgatggcggaggtgcagctgttggagtctgggggaggcttggtacagcctggggggtccctgagactctcctgtgcagcctctggattcacctttagcagctatgccatgagctgggtccgccaggctccagggaaggggctggagtgggtctcagctattagtggtagtggtggtagcacatactacgcagactccgtgaagggccggttcaccatctccagagacaattccaagaacacgctgtatctgcaaatgaacagcctgagagccgaggacacggccgtatattactgtgcgaaaggatatagtggctacgattactactttgactactggggccagggcaccctggtcaccgtctcctcaggtgagtcttcatatgaaccccccccaaaattgccgcggcgattttggggcaaaatcgggcgattttatggatccccgcggccgcaggcgtaatcatggtcatagctgtttcctgtgtgaaattgttatccgctcacaattccacacaacatacgagccggaagcataaagtgtaaagcctggggtgcctaatgagtgagctaactcacattaattgcgttgcgctcactgcccgctttccagtcgggaaacctgtcgtgccagctgcattaatgaatcggccaacgcgcggggagaggcggtttgcgtattgggcgctcttccgcttcctcgctcactgactcgctgcgctcggtcgttcggctgcggcgagcggtatcagctcactcaaaggcggtaatacggttatccacagaatcaggggataacgcaggaaagaacatgtgagcaaaaggccagcaaaaggccaggaaccgtaaaaaggccgcgttgctggcgtttttccataggctccgcccccctgacgagcatcacaaaaatcgacgctcaagtcagaggtggcgaaacccgacaggactataaagataccaggcgtttccccctggaagctccctcgtgcgctctcctgttccgaccctgccgcttaccggatacctgtccgcctttctcccttcgggaagcgtggcgctttctcatagctcacgctgtaggtatctcagttcggtgtaggtcgttcgctccaagctgggctgtgtgcacgaaccccccgttcagcccgaccgctgcgccttatccggtaactatcgtcttgagtccaacccggtaagacacgacttatcgccactggcagcagccactggtaacaggattagcagagcgaggtatgtaggcggtgctacagagttcttgaagtggtggcctaactacggctacactagaagaacagtatttggtatctgcgctctgctgaagccagttaccttcggaaaaagagttggtagctcttgatccggcaaacaaaccaccgctggtagcggtggtttttttgtttgcaagcagcagattacgcgcagaaaaaaaggatctcaagaagatcctttgatcttttctacggggtctgacgctcagtggaacgaaaactcacgttaagggattttggtcatgagattatcaaaaaggatcttcacctagatccttttaaattaaaaatgaagttttaaatcaatctaaagtatatatgagtaaacttggtctgacagttaccaatgcttaatcagtgaggcacctatctcagcgatctgtctatttcgttcatccatagttgcctgactccccgtcgtgtagataactacgatacgggagggcttaccatctggccccagtgctgcaatgataccgcgagacccacgctcaccggctccagatttatcagcaataaaccagccagccggaagggccgagcgcagaagtggtcctgcaactttatccgcctccatccagtctattaattgttgccgggaagctagagtaagtagttcgccagttaatagtttgcgcaacgttgttgccattgctacaggcatcgtggtgtcacgctcgtcgtttggtatggcttcattcagctccggttcccaacgatcaaggcgagttacatgatcccccatgttgtgcaaaaaagcggttagctccttcggtcctccgatcgttgtcagaagtaagttggccgcagtgttatcactcatggttatggcagcactgcataattctcttactgtcatgccatccgtaagatgcttttctgtgactggtgagtactcaaccaagtcattctgagaatagtgtatgcggcgaccgagttgctcttgcccggcgtcaatacgggataataccgcgccacatagcagaactttaaaagtgctcatcattggaaaacgttcttcggggcgaaaactctcaaggatcttaccgctgttgagatccagttcgatgtaacccactcgtgcacccaactgatcttcagcatcttttactttcaccagcgtttctgggtgagcaaaaacaggaaggcaaaatgccgcaaaaaagggaataagggcgacacggaaatgttgaatactcatactcttcctttttcaatattattgaagcatttatcagggttattgtctcatgagcggatacatatttgaatgtatttagaaaaataaacaaataggggttccgcgcacatttccccgaaaagtgccacctgacgtctaagaaaccattattatcatgacattaacctataaaaataggcgtatcacgaggccctttcgtc

SEQ ID NO: 67 - DNA, 1674 bp, Homo sapiens
atgaaagccatgccctggaactggacctgccttctctcccacctcctcatggtgggcatgggctcctccactttgctcacccggcagccagccccgctgtcccagaagcagcggtcatttgtcacattccgaggagagcccgccgagggtttcaatcacctggtggtggatgagaggacaggacacatttacttgggggccgtcaatcggatttacaagctctccagcgacctgaaggtcttggtgacgcatgagacagggccggacgaggacaaccccaagtgttacccaccccgcatcgtccagacctgcaatgagcccctgaccaccaccaacaatgtcaacaagatgctcctcatagactacaaggagaacaggctgattgcctgtgggagcctgtaccaaggcatctgcaagctgctgaggctggaggacctcttcaagctgggggagccttatcataagaaggagcactatctgtcaggtgtcaacgagagcggctcagtctttggagtgatcgtctcctacagcaacctggatgacaagctgttcattgccacggcagtggatgggaagcccgagtattttcccaccatctccagccggaaactgaccaagaactctgaggcggatggcatgttcgcgtacgtcttccatgatgagttcgtggcctcgatgattaagatcccttcggacaccttcaccatcatccctgactttgatatctactatgtctatggttttagcagtggcaactttgtctactttttgaccctccaacctgagatggtgtctccaccaggctccaccaccaaggagcaggtgtatacatccaagctcgtgaggctttgcaaggaggacacagccttcaactcctatgtagaggtgcccattggctgtgagcgcagtggggtggagtaccgcctgctgcaggctgcctacctgtccaaagcgggggccgtgcttggcaggacccttggagtccatccagatgatgacctgctcttcaccgtcttctccaagggccagaagcggaaaatgaaatccctggatgagtcggccctgtgcatcttcatcttgaagcagataaatgaccgcattaaggagcggctgcagtcttgttaccggggcgagggcacgctggacctggcctggctcaaggtgaaggacatcccctgcagcagtgcgctcttaaccattgacgataacttctgtggcctggacatgaatgctcccctgggagtgtccgacatggtgcgtggaattcccgtcttcacggaggacagggaccgcatgacgtctgtcatcgcatatgtctacaagaaccactctctggcctttgtgggcaccaaaagtggcaagctgaagaagatccgggtggatggacccaggggcaacgccctccagtatgagacggtgcaggtggtggaccccggcccagtcctccgggatatggccttctccaaggaccacgagcaactctacatcatgtcagagaggcagctcaccagagtccctgtggagtcctgtggtcagtatcagagctgcggcgagtgccttggctcaggcgacccccactgtggctggtgtgtgctgcacaacacttgcacccggaaggagcggtgtgagcggtccaaggagcccgactacaaggacgacgatgacaagtgatga

SEQ ID NO: 68 - protein, 556 aa, Homo sapiens
MKAMPWNWTCLLSHLLMVGMGSSTLLTRQPAPLSQKQRSFVTFRGEPAEGFNHLVVDERTGHIYLGAVNRIYKLSSDLKVLVTHETGPDEDNPKCYPPRIVQTCNEPLTTTNNVNKMLLIDYKENRLIACGSLYQGICKLLRLEDLFKLGEPYHKKEHYLSGVNESGSVFGVIVSYSNLDDKLFIATAVDGKPEYFPTISSRKLTKNSEADGMFAYVFHDEFVASMIKIPSDTFTIIPDFDIYYVYGFSSGNFVYFLTLQPEMVSPPGSTTKEQVYTSKLVRLCKEDTAFNSYVEVPIGCERSGVEYRLLQAAYLSKAGAVLGRTLGVHPDDDLLFTVFSKGQKRKMKSLDESALCIFILKQINDRIKERLQSCYRGEGTLDLAWLKVKDIPCSSALLTIDDNFCGLDMNAPLGVSDMVRGIPVFTEDRDRMTSVIAYVYKNHSLAFVGTKSGKLKKIRVDGPRGNALQYETVQVVDPGPVLRDMAFSKDHEQLYIMSERQLTRVPVESCGQYQSCGECLGSGDPHCGWCVLHNTCTRKERCERSKEPDYKDDDDK

SEQ ID NO: 69 - DNA, 333 bp, Artificial Sequence
  Synthetic DNA
cagtctgccctgactcagcctgcctccgtgtctgggtctcctggacagtcgatcaccatctcctgctctggaagcagctccaacatcggaagtaattatgtatactggtaccaacagcacccaggcaaagcccccaaactcatgatttataggaataatcagcggccctcaggggtttctaatcgcttctctggctccaagtctggcaacacggcctccctgaccatctctgggctccaggctgaggacgaggctgattattactgcgcagcatgggatgacagcctgagtggtcattgggtgttcggcggagggaccaagctgaccgtccta

SEQ ID NO: 70 - DNA, 333 bp, Artificial Sequence
  Synthetic DNA
cagtctgccctgactcagcctgcctccgtgtctgggtctcctggacagtcgatcaccatctcctgctctggaagcagctccaacatcggaaataatgctgtaaactggtaccaacagcacccaggcaaagcccccaaactcatgatttattatgatgatctgctgccctcaggggtttctaatcgcttctctggctccaagtctggcaacacggcctccctgaccatctctgggctccaggctgaggacgaggctgattattactgcggaacatgggatggcagcctgaatggtgggaggctgttcggcggagggaccaagctgaccgtccta

SEQ ID NO: 71 - DNA, 324 bp, Artificial Sequence
  Synthetic DNA
cagtctgccctgactcagcctgcctccgtgtctgggtctcctggacagtcgatcaccatctcctgctctggagaagcattgccaaaaaaatatgcttattggtaccaacagcacccaggcaaagcccccaaactcatgatttataaagacagcgagaggccctcaggggtttctaatcgcttctctggctccaagtctggcaacacggcctccctgaccatctctgggctccaggctgaggacgaggctgattattactgcaactcttttacaagcaccaccaattatgtcttattcggcggagggaccaagctgaccgtccta

SEQ ID NO: 72 - DNA, 345 bp, Artificial Sequence
  Synthetic DNA
cagtctgccctgactcagcctgcctccgtgtctgggtctcctggacagtcgatcaccatctcctgcaccctaagcagtgagcacagcacctacaccatcgaatggtaccaacagcacccaggcaaagcccccaaactcatgatttatgttaagagtgatggcagccacagcaagggggacggggtttctaatcgcttctctggctccaagtctggcaacacggcctccctgaccatctctgggctccaggctgaggacgaggctgattattactgcggagagagccacacgattgatggccaagtcggtgtggtattcggcggagggaccaagctgaccgtccta

SEQ ID NO: 73 - DNA, 336 bp, Artificial Sequence
  Synthetic DNA
cagtctgccctgactcagcctgcctccgtgtctgggtctcctggacagtcgatcaccatctcctgcactctgagcagtgggcacagtagctacatcatcgcatggtaccaacagcacccaggcaaagcccccaaactcatgatttatcttgaaggtagtggaagctacaacaaggggagcggggtttctaatcgcttctctggctccaagtctggcaacacggcctccctgaccatctctgggctccaggctgaggacgaggctgattattactgcgagacctgggacagtaacactcatgtggtattcggcggagggaccaagctgaccgtccta

SEQ ID NO: 74 - DNA, 333 bp, Artificial Sequence; identical to SEQ ID NO: 69
  Synthetic DNA

SEQ ID NO: 75 - DNA, 336 bp, Artificial Sequence
  Synthetic DNA
cagtctgccctgactcagcctgcctccgtgtctgggtctcctggacagtcgatcaccatctcctgcactgggagcagctccaacatcggggcaggttatgatgtacactggtaccaacagcacccaggcaaagcccccaaactcatgatttatggtaacagcaatcggccctcaggggtttctaatcgcttctctggctccaagtctggcaacacggcctccctgaccatctctgggctccaggctgaggacgaggctgattattactgccagtcctatgacagcagcctgagtggttctgtggtattcggcggagggaccaagctgaccgtccta

SEQ ID NO: 76 - DNA, 333 bp, Artificial Sequence
  Synthetic DNA
cagtctgccctgactcagcctgcctccgtgtctgggtctcctggacagtcgatcaccatctcctgctctggaagcagctccaacattgggaataattatgtatcctggtaccaacagcacccaggcaaagcccccaaactcatgatttatgacaataataagcgaccctcaggggtttctaatcgcttctctggctccaagtctggcaacacggcctccctgaccatctctgggctccaggctgaggacgaggctgattattactgcggaacatgggatagcagcctgagtgctggtgctgtgttcggcggagggaccaagctgaccgtccta

SEQ ID NO: 77 - DNA, 333 bp, Artificial Sequence
  Synthetic DNA
cagtctgccctgactcagcctgcctccgtgtctgggtctcctggacagtcgatcaccatctcctgcactgggagcagctccaacattggggcgggttatgttgtacattggtaccaacagcacccaggcaaagcccccaaactcatgatttatgaaaataataagcgaccctcaggggtttctaatcgcttctctggctccaagtctggcaacacggcctccctgaccatctctgggctccaggctgaggacgaggctgattattactgcagctcatatacaagcagcggcactcctgtggtattcggcggagggaccaagctgaccgtccta

SEQ ID NO: 78 - DNA, 363 bp, Artificial Sequence
  Synthetic DNA
cagtctgccctgactcagcctgcctccgtgtctgggtctcctggacagtcgatcaccatctcctgcactggaaccagcagtgatgttgggagttataaccttgtctcctggtaccaacagcacccaggcaaagcccccaaactcatgatttatgagggcagtaagcggccctcaggggtttctaatcgcttctctggctccaagtctggcaacacggcctccctgaccatctctgggctccaggctgaggacgaggctgattattactgccagtcctatgacagcagcctgagtggttgccagtcctatgacagcagcctgagtggtttggtgttcggcggagggaccaagctgaccgtccta

SEQ ID NO: 79 - DNA, 318 bp, Artificial Sequence
  Synthetic DNA
cagtctgccctgactcagcctgcctccgtgtctgggtctcctggacagtcgatcaccatctcctgcgggggaaacaacattggaagtaaaaatgtgcactggtaccaacagcacccaggcaaagcccccaaactcatgatttatagggatagcaaccggccctctggggtttctaatcgcttctctggctccaagtctggcaacacggcctccctgaccatctctgggctccaggctgaggacgaggctgattattactgccagtcctatgacaggagtggttgggtgttcggcggagggaccaagctgaccgtccta

SEQ ID NO: 80 - DNA, 324 bp, Artificial Sequence; identical to SEQ ID NO: 71
  Synthetic DNA

SEQ ID NO: 81 - DNA, 324 bp, Artificial Sequence
  Synthetic DNA
cagtctgccctgactcagcctgcctccgtgtctgggtctcctggacagtcgatcaccatctcctgcgggggaaacaacattggaagtaaaagtgtgcactggtaccaacagcacccaggcaaagcccccaaactcatgatttattatgatagcgaccggccctcaggggtttctaatcgcttctctggctccaagtctggcaacacggcctccctgaccatctctgggctccaggctgaggacgaggctgattattactgccaggtgtgggatgataatagtgatcatcttatattcggcggagggaccaagctgaccgtccta

SEQ ID NO: 82 - DNA, 321 bp, Artificial Sequence
  Synthetic DNA
cagtctgccctgactcagcctgcctccgtgtctgggtctcctggacagtcgatcaccatctcctgctctggagatgcattgccaaagcaatatgcttattggtaccaacagcacccaggcaaagcccccaaactcatgatttatgatgatagcgaccggccctcaggggtttctaatcgcttctctggctccaagtctggcaacacggcctccctgaccatctctgggctccaggctgaggacgaggctgattattactgcagctcatatgcaggcagcaacaattgggtgttcggcggagggaccaagctgaccgtccta

SEQ ID NO: 83 - DNA, 345 bp, Artificial Sequence; identical to SEQ ID NO: 72
  Synthetic DNA

SEQ ID NO: 84 - DNA, 345 bp, Artificial Sequence
  Synthetic DNA
cagtctgccctgactcagcctgcctccgtgtctgggtctcctggacagtcgatcaccatctcctgcactctgagcagtgggcacagcagctacgccatcgcatggtaccaacagcacccaggcaaagcccccaaactcatgatttatcttaacagtgatggcagccacagcaagggggacggggtttctaatcgcttctctggctccaagtctggcaacacggcctccctgaccatctctgggctccaggctgaggacgaggctgattattactgcagctcatatgcaggcaacaacaatttgggggatgtgcttttcggcggagggaccaagctgaccgtccta

SEQ ID NO: 85 - DNA, 342 bp, Artificial Sequence
  Synthetic DNA
cagtctgccctgactcagcctgcctccgtgtctgggtctcctggacagtcgatcaccatctcctgcaccttgcgcagtggcatcaatgttggtacctacaggatatactggtaccaacagcacccaggcaaagcccccaaactcatgatttattacaaatcagactcagataagcagcagggctctggggtttctaatcgcttctctggctccaagtctggcaacacggcctccctgaccatctctgggctccaggctgaggacgaggctgattattactgcgcagcatgggatgacagcctgaatgtggtattcggcggagggaccaagctgaccgtccta

SEQ ID NO: 86 - DNA, 327 bp, Artificial Sequence
  Synthetic DNA
cagtctgccctgactcagcctgcctccgtgtctgggtctcctggacagtcgatcaccatctcctgcacccgcagcagtggcagcattgccagcaactatgtgcagtggtaccaacagcacccaggcaaagcccccaaactcatgatttatgaggataaccaaagaccctctggggtttctaatcgcttctctggctccaagtctggcaacacggcctccctgaccatctctgggctccaggctgaggacgaggctgattattactgccagtcctatgacagcagcctgaggagagtcttcggcggagggaccaagctgaccgtccta

SEQ ID NO: 87 - DNA, 333 bp, Artificial Sequence
  Synthetic DNA
cagtctgccctgactcagcctgcctccgtgtctgggtctcctggacagtcgatcaccatctcctgcggctccagcactggagctgtcaccagtggtcattatccctactggtaccaacagcacccaggcaaagcccccaaactcatgatttatgatacaagcaacaaacactccggggtttctaatcgcttctctggctccaagtctggcaacacggcctccctgaccatctctgggctccaggctgaggacgaggctgattattactgcgcaacatgggatgacagcctgaatgagggagtgttcggcggagggaccaagctgaccgtccta

SEQ ID NO: 88 - DNA, 348 bp, Artificial Sequence
  Synthetic DNA
cagtctgccctgactcagcctgcctccgtgtctgggtctcctggacagtcgatcaccatctcctgcaccctgagcagcggctacagtaattataaagtggactggtaccaacagcacccaggcaaagcccccaaactcatgatttatgtgggcactggtgggattgtgggatccaagggggatggggtttctaatcgcttctctggctccaagtctggcaacacggcctccctgaccatctctgggctccaggctgaggacgaggctgattattactgcggggcagaccatggcagtgggagcaacttcgtggtggtattcggcggagggaccaagctgaccgtccta

SEQ ID NO: 89 - DNA, 369 bp, Artificial Sequence
  Synthetic DNA
gaggtgcagctgttggagtctgggggaggcttggtacagcctggggggtccctgagactctcctgtgcagcctctggattcacctttagcggctactatatgcactgggtccgccaggctccagggaaggggctggagtgggtctcatggatcaaccctaacagtggtggcacaaactatgcacagaagtttcagggccggttcaccatctccagagacaattccaagaacacgctgtatctgcaaatgaacagcctgagagccgaggacacggccgtatattactgtgcgaaaggttggggctatacggtgactaccctcaactggttcgacccctggggccagggcaccctggtcaccgtctcctca

SEQ ID NO: 90 - DNA, 366 bp, Artificial Sequence
  Synthetic DNA
gaggtgcagctgttggagtctgggggaggcttggtacagcctggggggtccctgagactctcctgtgcagcctctggattcacctttagcagctatgctatgcattgggtccgccaggctccagggaaggggctggagtgggtctcatggatcaacgctggcaatggtaacacaaaatattcacagaagttccagggccggttcaccatctccagagacaattccaagaacacgctgtatctgcaaatgaacagcctgagagccgaggacacggccgtatattactgtgcgaaagcgtctagtagtggttattactacgtccactttgactactggggccagggcaccctggtcaccgtctcctca

SEQ ID NO: 91 - DNA, 363 bp, Artificial Sequence
  Synthetic DNA
gaggtgcagctgttggagtctgggggaggcttggtacagcctggggggtccctgagactctcctgtgcagcctctggattcacctttagcagttatgatatcaactgggtccgccaggctccagggaaggggctggagtgggtctcatggatgaaccctaacagtggtaacacaggctatgcacagaagttccagggccggttcaccatctccagagacaattccaagaacacgctgtatctgcaaatgaacagcctgagagccgaggacacggccgtatattactgtgcgaaatccagcagctggcactactactacggtatggacgtctggggccagggcaccctggtcaccgtctcctca

SEQ ID NO: 92 - DNA, 360 bp, Artificial Sequence
  Synthetic DNA
gaggtgcagctgttggagtctgggggaggcttggtacagcctggggggtccctgagactctcctgtgcagcctctggattcacctttagcagctatggtatcagctgggtccgccaggctccagggaaggggctggagtgggtctcatggatcagcgcttacaatggtaacacaaactatgcacagaagctccagggccggttcaccatctccagagacaattccaagaacacgctgtatctgcaaatgaacagcctgagagccgaggacacggccgtatattactgtgcgaaagatttaaggttatcctattactactttgactactggggccagggcaccctggtcaccgtctcctca

SEQ ID NO: 93 - DNA, 360 bp, Artificial Sequence
  Synthetic DNA
gaggtgcagctgttggagtctgggggaggcttggtacagcctggggggtccctgagactctcctgtgcagcctctggattcacctttagcgaattatccatgcactgggtccgccaggctccagggaaggggctggagtgggtctcaggttttgatcctgaagatggtgaaacaatctacgcacagaagttccagggccggttcaccatctccagagacaattccaagaacacgctgtatctgcaaatgaacagcctgagagccgaggacacggccgtatattactgtgcgaaaggaacctactactactactacggtatggacgtctggggccagggcaccctggtcaccgtctcctca

SEQ ID NO: 94 - DNA, 369 bp, Artificial Sequence; identical to SEQ ID NO: 89
  Synthetic DNA

SEQ ID NO: 95 - DNA, 363 bp, Artificial Sequence; identical to SEQ ID NO: 91
  Synthetic DNA

SEQ ID NO: 96 - DNA, 360 bp, Artificial Sequence; identical to SEQ ID NO: 93
  Synthetic DNA

SEQ ID NO: 97 - DNA, 363 bp, Artificial Sequence
  Synthetic DNA
gaggtgcagctgttggagtctgggggaggcttggtacagcctggggggtccctgagactctcctgtgcagcctctggattcacctttagcagctactatatgcactgggtccgccaggctccagggaaggggctggagtgggtctcaataatcaaccctagtggtggtagcacaagctacgcacagaagttccagggccggttcaccatctccagagacaattccaagaacacgctgtatctgcaaatgaacagcctgagagccgaggacacggccgtatattactgtgcgaaaagtttcagcagcagctggtacaactggttcgacccctggggccagggcaccctggtcaccgtctcctca

SEQ ID NO: 98 - DNA, 357 bp, Artificial Sequence
  Synthetic DNA
gaggtgcagctgttggagtctgggggaggcttggtacagcctggggggtccctgagactctcctgtgcagcctctggattcacctttagcagctatgctatcagctgggtccgccaggctccagggaaggggctggagtgggtctcagggatcatccctatctttggtacagcaaactacgcacagaagttccagggccggttcaccatctccagagacaattccaagaacacgctgtatctgcaaatgaacagcctgagagccgaggacacggccgtatattactgtgcgaaagggtccgtcctcggtgatgcttttgatatctggggccagggcaccctggtcaccgtctcctca

SEQ ID NO: 99 - DNA, 366 bp, Artificial Sequence
  Synthetic DNA
gaggtgcagctgttggagtctgggggaggcttggtacagcctggggggtccctgagactctcctgtgcagcctctggattcacctttagcaatgctagaatgggtgtgagctgggtccgccaggctccagggaaggggctggagtgggtctcacacattttttcgaatgacgaaaaatcctacagcacatctctgaagagccggttcaccatctccagagacaattccaagaacacgctgtatctgcaaatgaacagcctgagagccgaggacacggccgtatattactgtgcgaaaatcccgtatgaagcagtggctggctactttgactactggggccagggcaccctggtcaccgtctcctca

SEQ ID NO: 100 - DNA, 360 bp, Artificial Sequence
  Synthetic DNA
gaggtgcagctgttggagtctgggggaggcttggtacagcctggggggtccctgagactctcctgtgcagcctctggattcacctttagcagctattggatgagctgggtccgccaggctccagggaaggggctggagtgggtctcaaacataaagcaagatggaagtgagaaatactatgtggactctgtgaagggccggttcaccatctccagagacaattccaagaacacgctgtatctgcaaatgaacagcctgagagccgaggacacggccgtatattactgtgcgaaagttacggtgaccgggacctggtacttcgatctctggggccagggcaccctggtcaccgtctcctca

SEQ ID NO: 101 - DNA, 372 bp, Artificial Sequence
  Synthetic DNA
gaggtgcagctgttggagtctgggggaggcttggtacagcctggggggtccctgagactctcctgtgcagcctctggattcacctttagcagctacgacatgcactgggtccgccaggctccagggaaggggctggagtgggtctcagctattggtactgctggtgacacatactatccaggctccgtgaagggccggttcaccatctccagagacaattccaagaacacgctgtatctgcaaatgaacagcctgagagccgaggacacggccgtatattactgtgcgaaagcggatacagctatggtcatttactactactactacggtatggacgtctggggccagggcaccctggtcaccgtctcctca

SEQ ID NO: 102 - DNA, 357 bp, Artificial Sequence
  Synthetic DNA
gaggtgcagctgttggagtctgggggaggcttggtacagcctggggggtccctgagactctcctgtgcagcctctggattcacctttagcagctatagcatgaactgggtccgccaggctccagggaaggggctggagtgggtctcatccattagtagtagtagtagttacatatactacgcagactcagtgaagggccggttcaccatctccagagacaattccaagaacacgctgtatctgcaaatgaacagcctgagagccgaggacacggccgtatattactgtgcgaaagagaatagtggctatgattactttgactactggggccagggcaccctggtcaccgtctcctca

SEQ ID NO: 103 - DNA, 357 bp, Artificial Sequence
  Synthetic DNA
gaggtgcagctgttggagtctgggggaggcttggtacagcctggggggtccctgagactctcctgtgcagcctctggattcacctttagcgattatgctatgagctgggtccgccaggctccagggaaggggctggagtgggtctcattcattagaagcaaagcttatggtgggacaacagaatacaccgcgtctgtgaaaggccggttcaccatctccagagacaattccaagaacacgctgtatctgcaaatgaacagcctgagagccgaggacacggccgtatattactgtgcgaaagatctaggtagtggctttgactactggggccagggcaccctggtcaccgtctcctca

SEQ ID NO: 104 - DNA, 378 bp, Artificial Sequence
  Synthetic DNA
gaggtgcagctgttggagtctgggggaggcttggtacagcctggggggtccctgagactctcctgtgcagcctctggattcacctttagcgaccactacatggactgggtccgccaggctccagggaaggggctggagtgggtctcacgtactagaaacaaagctaacagttacaccacagaatacgccgcgtctgtgaaaggccggttcaccatctccagagacaattccaagaacacgctgtatctgcaaatgaacagcctgagagccgaggacacggccgtatattactgtgcgaaaggaggccaggggagccgatactactactactacggtatggacgtctggggccagggcaccctggtcaccgtctcctca

SEQ ID NO: 105 - DNA, 345 bp, Artificial Sequence
  Synthetic DNA
gaggtgcagctgttggagtctgggggaggcttggtacagcctggggggtccctgagactctcctgtgcagcctctggattcacctttagcagcaatgagatgagctgggtccgccaggctccagggaaggggctggagtgggtctcatccattagtggtggtagcacatactacgcagactccaggaagggccggttcaccatctccagagacaattccaagaacacgctgtatctgcaaatgaacagcctgagagccgaggacacggccgtatattactgtgcgaaagactcatatgatgcttttgatatctggggccagggcaccctggtcaccgtctcctca

SEQ ID NO: 106 - DNA, 357 bp, Artificial Sequence
  Synthetic DNA
gaggtgcagctgttggagtctgggggaggcttggtacagcctggggggtccctgagactctcctgtgcagcctctggattcacctttagcagtggtggttactcctggagctgggtccgccaggctccagggaaggggctggagtgggtctcatacatctatcatagtgggagcacctactacaacccgtccctcaagagtcggttcaccatctccagagacaattccaagaacacgctgtatctgcaaatgaacagcctgagagccgaggacacggccgtatattactgtgcgaaagatgcgagtaaccatttctttgactactggggccagggcaccctggtcaccgtctcctca

SEQ ID NO: 107 - DNA, 360 bp, Artificial Sequence
  Synthetic DNA
gaggtgcagctgttggagtctgggggaggcttggtacagcctggggggtccctgagactctcctgtgcagcctctggattcacctttagcagtagtagttactactggggctgggtccgccaggctccagggaaggggctggagtgggtctcaagtatctattatagtgggagcacctactacaacccgtccctcaagagtcggttcaccatctccagagacaattccaagaacacgctgtatctgcaaatgaacagcctgagagccgaggacacggccgtatattactgtgcgaaaaaggactggaacgacaactggttcgacccctggggccagggcaccctggtcaccgtctcctca

SEQ ID NO: 108 - DNA, 381 bp, Artificial Sequence
  Synthetic DNA
gaggtgcagctgttggagtctgggggaggcttggtacagcctggggggtccctgagactctcctgtgcagcctctggattcacctttagcagcaacagtgctgcttggaactgggtccgccaggctccagggaaggggctggagtgggtctcaaggacatactacaggtccaagtggtataatgattatgcagtatctgtgaaaagtcggttcaccatctccagagacaattccaagaacacgctgtatctgcaaatgaacagcctgagagccgaggacacggccgtatattactgtgcgaaagatattgtagtagtaccagctgctatatactggtacttcgatctctggggccagggcaccctggtcaccgtctcctca

SEQ ID NO: 109 - DNA, 14405 bp, Artificial Sequence
  Synthetic DNA
tcgcgcgtttcggtgatgacggtgaaaacctctgacacatgcagctcccggagacggtcacagcttgtctgtaagcggatgccgggagcagacaagcccgtcagggcgcgtcagcgggtgttggcgggtgtcggggctggcttaactatgcggcatcagagcagattgtactgagagtgcaccatatgcggtgtgaaataccgcacagatgcgtaaggagaaaataccgcatcaggcgccattcgccattcaggctgcgcaactgttgggaagggcgatcggtgcgggcctcttcgctattacgccagctggcgaaagggggatgtgctgcaaggcgattaagttgggtaacgccagggttttcccagtcacgacgttgtaaaacgacggccagtttcccgaagcgaaagccgcgtgttatttttgggtgggaaagccccgattcgctcctttttttttatttattatttttgttgtttttcgtgtctttttcttctccgttttgcagctgcggcctccaggtgtccccggccgtggtatttttgggtcgaaaaagccgctttttggctcacttggaaacctttcgggcgtctccaagcggagcgttggcgggaaatggtgttttttttgggttgttttcggtcccttttttcaccatttttgtggtttttcggcccattttcggcctcccccccccccccccccttcccgtggggctgcgctccgtggagcggaatggggtcgttaattaaggttaattggtttaattaatgggccgtgcagggagaagagggccgtgcggtggttgttagccctgattaatggcttggttgaggggagagtgtaattaagtgcttcgttagcactaattaatggcttgattgagaggagagtgtaattaaatgcttcataatccctaattaatggcttggttgagacaagagtgtaattaagtgcttcattagccctgattaatggcttggttgaggggagagtgtaattaaatgcttcgttagcactaattaatggcttgattgagaggagagtgtaattaaatgcttcataatccctaattaatggcttggttgagacaagagtgtaattaagtgcttcattagccctgattaatggcttggttgagaggagagtgtaattaaatgcttcattatccctaattagggactgaattccaaggagagtgtaattaagtgcttcattatccctaattaatggcttggttgagaggagagtgtaattaaatgctttgttagccctaattaatggtttgatggagaggagagtgtaattaagtgcttcattatccctaattaatggcttggttgaggggagagtgtaattaaatgcttagttagccctaattaatggcttggttgagaggagagtgtaattgaatgcttcattatccctaattagggattgaattgagaggagagtgtaattgaatgctttgttagccctaattagggattgaattgagaggagagtgtaattaaatgcctcattatccctaattagggattgaattgagaggagagtttaattaaatgcctcattatccctaattagggactgaattccgacgagagtgtaattaagtgcttcatttagccctaattaatggcttgattgagaggagagtgtaattaaatgcttcattatccctaattagggattgaattgagaggagagtgtaattaaatgcttcattatccctaattagggattgaattgagaggagagtgtaattaaatgcttcattatccctaattaatggcttggttgagaggggagtgtaattaagtgcttcgttatccctaattagggattgaattgtgaggagatggcaattaatacttcattatccctaattaatttaattagtccctattatccctaatttaattcatggtttggttgatggaagaatgtaattaaatgctttgttatccctaattaatggtttgattgagcggagagtgtaattaaatgcttcattatcccttattaatggttgtgtggaatgtagtgtaattagaagtccctaattaatggtttaattgagagaagactgcaattagatgactcatagcccctaataagtggtttaattatgagataatcacaattacatgtttcattgtccctaattaatcgtttaattgcgagaagatcacaattaattaaatgatccctaattgctaccgttcgtataatgtatactatacgaagttattttatttgtgaaatttgtgatgctattgctttatttgtaaccattataagctgcaataaacaagttggggtgggcgaagaactccagcatgagatccccgcgctggaggatcatccagccggcgtcccggaaaacgattccgaagcccaacctttcatagaaggcggcggtggaatcgaaatctcgtgatggcaggttgggcgtcgcttggtcggtcatttcgaaccccagagtcccgctcagaagaactcgtcaagaaggcgatagaaggcgatgcgctgcgaatcgggagcggcgataccgtaaagcacgaggaagcggtcagcccattcgccgccaagctcttcagcaatatcacgggtagccaacgctatgtcctgatagcggtccgccacacccagccggccacagtcgatgaatccagaaaagcggccattttccaccatgatattcggcaagcaggcatcgccatgggtcacgacgagatcctcgccgtcgggcatgcgcgccttgagcctggcgaacagttcggctggcgcgagcccctgatgctcttcgtccagatcatcctgatcgacaagaccggcttccatccgagtacgtgctcgctcgatgcgatgtttcgcttggtggtcgaatgggcaggtagccggatcaagcgtatgcagccgccgcattgcatcagccatgatggatactttctcggcaggagcaaggtgagatgacaggagatcctgccccggcacttcgcccaatagcagccagtcccttcccgcttcagtgacaacgtcgagcacagctgcgcaaggaacgcccgtcgtggccagccacgatagccgcgctgcctcgtcctgcagttcattcagggcaccggacaggtcggtcttgacaaaaagaaccgggcgcccctgcgctgacagccggaacacggcggcatcagagcagccgattgtctgttgtgcccagtcatagccgaatagcctctccacccaagcggccggagaacctgcgtgcaatccatcttgttcaatcatgcgaaacgatcctcatcctgtctcttgatcagatccgaaaatggatatacaagctcccgggagctttttgcaaaagcctaggcctccaaaaaagcctcctcactacttctggaatagctcagaggcagaggcggcctcggcctctgcataaataaaaaaaattagtcagccatggggcggagaatgggcggaactgggcggagttaggggcgggatgggcggagttaggggcgggactatggttgctgactaattgagatgcatgctttgcatacttctgcctgctggggagcctggggactttccacacctggttgctgactaattgagatgcatgctttgcatacttctgcctgctggggagcctggggactttccacaccctaaataacttcgtataatgtatactatacgaacggtagcgttaacaagcttctgtggaatgtgtgtcagttagggtgtggaaagtccccaggctccccaggcaggcagaagtatgcaaagcatgcatctcaattagtcagcaaccaggtgtggaaagtccccaggctccccagcaggcagaagtatgcaaagcatgcatctcaattagtcagcaaccatagtcccgcccctaactccgcccatcccgcccctaactccgcccagttccgcccattctccgccccatggctgactaattttttttatttatgcagaggccgaggccgcctctgcctctgagctattccagaagtagtgaggaggcttttttggaggcctaggcttttgcaaaaagctataacttcgtatatggtattatatacgaagttatcccaccccaacttgtttattgcagcttataatggttacaaataaagcaatagcatcacaaatttcacaaataaagcatttttttcactgcattctagttgtggtttgtccaaactcatcaatgtatcttatcatgtctgtataccgtcgacctctagctagagcttggcgtaatcatggtcatagctgtttcctgtgtgcccaccccaacttgtttattgcagcttataatggttacaaataaagcaatagcatcacaaatttcacaaataaagcatttttttcactgcattctagttgtggtttgtccaaactcatcaatgtatcttatcatgtctggagctcgctagcgtttaaacggtaccataacttcgtatattctatcttatacgaacggtactcgagatgcgtcgacatttaaatgttggcgcagaagggattcatatcaattaattccctgtcctcaattaatgcataattgggagtgcgatggaatcattcaataagtaatgaggacttggtgtcaaaatgccaattaagtaattaatgacacccaattaatacacaatggggattacagtggaataactcagtgaagttcatatctaaattgcaattgaataattaattacagctaattaatggatgggagactggcagtggtataacttaatgaaggaacacagtgaattcctgtctgaattgaaattaattgatttattagggctaattaatgaatggtggggttaaaaatagcattactcagcgaaggaacatgagttcatggctaaattgagattgaattattaattacaactaattgattaatgactgatgggagtaagaatggaataactcagtgaaggaacacaatggattcatggcctaattgaaattaaatggttaattagagctaattaatgaatgatggggggtggcaatggaatgatacaagaaagaaacacaatgggttcgtgtctacattgaaattaaataattaattacagctaattaataaacggcgaggttgacaatggtataactgtgaagagacagaatgagttcgtgactaaattggtattaaatgattaattagagctaattaacaggtggtggggctgagaatggcataactcaatgggggatgatgagctgatggcttaattggaattaataattaatcacaaccaattaacaggtgctgttaatggggttacaggggcatgacttcaggaagaagcacaaagtggccattaaataattaattgcacccaattaattcctgatggggattactgcagaggaactcagcgaaggattcaagcagaaatgacacagttaggttgctcaattgcgttaattaattaaaatcgctaattaggtgagcttcattaaggcctgatggggttcatcccaacgctgggatcaaagaactcagcgcagagtggataacgataattagaaggggacaaattaatgaggaaacacgactttgggcctagacggccattaaatcattaatcaacccgacgggcgcccaattaatcataaagttattaagcaattaagtcgaggctgacgagaaaccgcaacgagagccctccacgctcctttgagttggcgcaaacaacaaacaacgcgggctcgttaagcagcgacgacgccgagcgtaacgaagcaatccccgcgcccgacaattaacgcgctaacgaagccggagccctccttatgcaaattagcccctccagagggccataaaagcgccggctctccgacggcgcgggaggagcaccagtcggctccgcaaccatgagcccactcgtctcctccctcctgctcctggccgccctgccaggtgagggcgctgtggggctctatggggctctatggggtctcagcggggctctgcgggctcaatgggggccaaagggggggtctgcgggctctatgggggggtcaacggggggtctcacggggggccggctccgcgaggccgtgtggcggcggctccgtcagcgctctctgggcgcgcctccttccccacagggctgatggcggaggtgcagctgttggagtctgggggaggcttggtacagcctggggggtccctgagactctcctgtgcagcctctggattcacctttagcagctatgccatgagctgggtccgccaggctccagggaaggggctggagtgggtctcagctattagtggtagtggtggtagcacatactacgcagactccgtgaagggccggttcaccatctccagagacaattccaagaacacgctgtatctgcaaatgaacagcctgagagccgaggacacggccgtatattactgtgcgaaaggatatagtggctacgattactactttgactactggggccagggcaccctggtcaccgtctcctcaggtgagtcttcatatgaaccccccccaaaattgccgcggcgattttggggcaaaatcgggcgattttatggatccccgctaccgttcgtatagcatacattatacgaagttatcagacatgataagatacattgatgagtttggacaaaccacaactagaatgcagtgaaaaaaatgctttatttgtgaaatttgtgatgctattgctttatttgtaaccattataagctgcaataaacaagttggggtgggcgaagaactccagcatgagatccccgcgctggaggatcatccagccggcgtcccggaaaacgattccgaagcccaacctttcatagaaggcggcggtggaatcgaaatctcgtagcacgtgtcagtcctgctcctcggccacgaagtgcttagccctcccacacataaccagagggcagcaattcacgaatcccaactgccgtcggctgtccatcactgtccttcactatggctttgatcccaggatgcagatcgagaagcacctgtcggcaccgtccgcaggggctcaagatgcccctgttctcatttccgatcgcgacgatacaagtcaggttgccagctgccgcagcagcagcagtgcccagcaccacgagttctgcacaaggtcccccagtaaaatgatatacattgacaccagtgaagatgcggccgtcgctagagagagctgcgctggcgacgctgtagtcttcagagatggggatgctgttgattgtagccgttgctctttcaatgagggtggattcttcttgagacaaaggcttggccatggtttagttcctcaccttgtcgtattatactatgccgatatactatgccgatgattaattgtcaacacgtgctgatcagatccgaaaatggatatacaagctcccgggagctttttgcaaaagcctaggcctccaaaaaagcctcctcactacttctggaatagctcagaggcagaggcggcctcggcctctgcataaataaaaaaaattagtcagccatggggcggagaatgggcggaactgggcggagttaggggcgggatgggcggagttaggggcgggactatggttgctgactaattgagatgcatgctttgcatacttctgcctgctggggagcctggggactttccacacctggttgctgactaattgagatgcatgctttgcatacttctgcctgctggggagcctggggactttccacaccctaactgacacacattccacagataacttcgtatagcatacattatacgaacggtagcctgggtcagtcgaagggggcggtcggtccatcatttgcggccgggtgatttttggggccgaaaagtgggaatttggggcccaatttggggcccaatttggggcccaatttgggttttcgaggggggatttttttagggggagattttgggtccccggaaaatggtgattttgggtcaaaaatggggattttggggtcgttttgaggtggggttttttggggtagaaatggcggtctgaggggaaaatgtcgttttggggccattttgggccatttgaggggaaatttgggtcaaaaaatgacgattttgggtcgttttagggaggaaaatgaatttagggcgatttgagccaaatttgggtcaaaaatggcgattttgagtcaaaaaatgattattttgggtcattttagggaggaaaatgaatttagggagattggacggcaaatttgggtcaaaaaatggtgattttgggtcaaaaaatgattattttgggtcattttagggagaaaaatgaatttagggagatttgagggcaaatttgggtcaaaaaatggtgattttgggtcaaaaaatgattattttgggtcattttagggagaaaaatgaatttagggagatttgagggcaaatttgggtcgaaaaatggcgattttgggtgaaaaatggacaattttgggtcattttagggttaaaaatgaatttagggagattggacggcaaatttgggtcaaaaaatggtgatttggggtcaaaaaataattattttgggtcattttagggataaaaaatgaatttagggagatttgagggcaaatttgggtcgaaaaatggtgatttggggtgaaaaatggacaattttgggtcattttagggataaaaaatgaatttagggcgatttgagccaaatttgggtcaaaaatggcgattttgagtcaaaaaatgattattttgggtcattttagggttaaaaatgaatttagggagattggacggcaaatttgggtcaaaaaatggtgattttcggtcaaaaaatgattattttgggtcattttagggagaaaaatgaatttagggagattggacggcaaatttgggtcgaaaaatggtgattttgggtcaaaaatggacaatttggggtcattttagggataaaaatgaatttagggagatttgagagcaaatttgggtctaaaaatgtcaatttggggtcaaaaatggtgattttgggtcattttagggatataaatgaattttgggagatttgagggcaaatttgggtcgaaaaatggtgatttggggtcaatttagggaggaaaatgaatttaaggtgatttgacggcaaatttgggttgaaaaatgacaatttggggtcattttaaagataaaatgaatttagggcgatttgagggcaaatttgggtcgaaaaatggtgatttgggtcaaaaaatgacaattttgggtcattttagggatataaatggacttagagcgatttgagggcaaatttggttgaaaaaatggacaatttgggtcattttagggatataaatgaatttagggagatttgatggcaaatttgggtcgaaaaatggtgatttgggtcaaaaatggtgattttggttgaaaaacagtcatttggggtcattttagggattaaaatgaatttcgggagatttgagggcaaatttgggtcaaaaaatggtgattttgggtcaattagtgataaaaaaatgaatttagggtgatttgagggcaaatttgggtcaaaaaatgacaatttggggtttttttagggaggagaatgaatttagggagttttgagggcaaatttgggtcaaaaaatagtgatttgggtcaaaagtggtgattttggttgaaaaacagtcattttgggtcattttagggagaaaaatgaatttcgggagatttgagggcaaatttgggtcaaaaaatgacaattttgggtcactttacgaattaaaatgaatttagggagatttgagggcaaatttgggtcaaaatatggtgattttgggtcaatttagggaggaaaatgaatttagggcgatttgaaggcaaatttgggtcgaaaatggtgattttgggtcaaaaaatgatgattttgggtcgttttagggagaaaatgaatttagggagatttgagggcaaatttgggtcaaaaaatggtgattttgggtcattgtagggataaaaatgaatttggggcgatttgagggcaaatttgggtggaaaatggacaattttgggtcattttagggagaaaaatgaatttagggagatttgagggcaaatttgggtcaaaaaatggtgatttggggtcattttcagaagaaaaaatgattattttccccactaaaaatgtatattttggggccaaatggtgaaaaatggtgatttttaatcaaacgtccccaaaattggggaaatttcatcgatttgacccaaaattgagttttttttccctgttaaaaatgtacattttggggtcaatcgctgaaatgttcccacttttcacttctttgcccccaaattttgctgtccggtgagaaattaattaattaatgatcattaattgatcgacaattaatggttattaattaattaataggtcctcttttggtgactccttcgcttttggggccaaaagtccataaattggccccaaaaaattaacgctgagtaattggattccaaagtattaatgataaacattaaaagtgtttaattaataatgatattaaacataatttcgtttttattatcgatttatcaacaacgatgaacgataatactttacaacaatcgctaataattaattaattatttaattaattaatttctaataattacttcgcattatcggacacgagatgttgtaattattaataatttaattcctaataattagaagattcgttgaaaatggtacttatctttacaaataatcacttctaataataatgattaataatagttaataacaacaatgacgataatgacgataatattaataatatgtgatatatttaatataaaattcgtattaatatattatatctacaaaatatgatataaaatataatattttatttatatataacacaatttattattattatcattattatcattattaatatcatcattattaacgttatcgaaatacttatttagaaataataaaaacggatttaatgatggcaacaaaaatattttattaatgttaaaaaaaaataattaataatttccaaagattcgaattcggggcaacgaacggcactcgataatttttaattaattaatagtttgaattaatcggtactttttaatcctccattttgcccgaaatcgccgttttttgccccaaattccccaccgcggcgttaaaaacataaagaaattaagcatcaaaagtgcccttttttggggttgttttgacccaaaaaaaaaatggccgaattgggggcggccgttttacggttgggttcattttgggttcaaaacagccaaaaatgggaactttgggtttcgaaaacaacaacaacaaaaaaacgggtttattttgggctcattttgggtgtttttgggtcaggaggagaaaaaataggaagtttgagagcgaaacaacggccgcttttggggggaaaacggccctttttggtcaacggcgggggaaaaaaaaaagcggagtttttggggtgaaaaagagcggttttgggtaaatttgggttttggggtaaaagtggaggattttgggcaatgggagttaaaaaatgggtgtttttatgggggttcggtgcagtttttcctgtttgatggggggtttattaatccggggggggggattaatgagaattaataatgttaatagaaatatctgggaaattaatagcaattattaattgttaatagttattaatagttctatatatctcacatctacgatacaatataatatcgttacaatcatatagtcgatatattacatataattatcagtaataataataagtaacaataattagcagtaattaataataataattaatagtattcgttaataagattattgataataattaagtagtagcgattaatagagatgggatttcgtgagaaatggaccaaatttgggccgttttgacccaaatttttggtggttttttttccgattctttgtgaatttcgggtcggattcatcagcaattaattacggttattaggggctattagaggcttttaattgggattattagagacttttaagcggatttggggacttttaagtggattttatgattcttaagtggattttgggtggattttaccgcttttgcggccgcaggcgtaatcatggtcatagctgtttcctgtgtgaaattgttatccgctcacaattccacacaacatacgagccggaagcataaagtgtaaagcctggggtgcctaatgagtgagctaactcacattaattgcgttgcgctcactgcccgctttccagtcgggaaacctgtcgtgccagctgcattaatgaatcggccaacgcgcggggagaggcggtttgcgtattgggcgctcttccgcttcctcgctcactgactcgctgcgctcggtcgttcggctgcggcgagcggtatcagctcactcaaaggcggtaatacggttatccacagaatcaggggataacgcaggaaagaacatgtgagcaaaaggccagcaaaaggccaggaaccgtaaaaaggccgcgttgctggcgtttttccataggctccgcccccctgacgagcatcacaaaaatcgacgctcaagtcagaggtggcgaaacccgacaggactataaagataccaggcgtttccccctggaagctccctcgtgcgctctcctgttccgaccctgccgcttaccggatacctgtccgcctttctcccttcgggaagcgtggcgctttctcatagctcacgctgtaggtatctcagttcggtgtaggtcgttcgctccaagctgggctgtgtgcacgaaccccccgttcagcccgaccgctgcgccttatccggtaactatcgtcttgagtccaacccggtaagacacgacttatcgccactggcagcagccactggtaacaggattagcagagcgaggtatgtaggcggtgctacagagttcttgaagtggtggcctaactacggctacactagaagaacagtatttggtatctgcgctctgctgaagccagttaccttcggaaaaagagttggtagctcttgatccggcaaacaaaccaccgctggtagcggtggtttttttgtttgcaagcagcagattacgcgcagaaaaaaaggatctcaagaagatcctttgatcttttctacggggtctgacgctcagtggaacgaaaactcacgttaagggattttggtcatgagattatcaaaaaggatcttcacctagatccttttaaattaaaaatgaagttttaaatcaatctaaagtatatatgagtaaacttggtctgacagttaccaatgcttaatcagtgaggcacctatctcagcgatctgtctatttcgttcatccatagttgcctgactccccgtcgtgtagataactacgatacgggagggcttaccatctggccccagtgctgcaatgataccgcgagacccacgctcaccggctccagatttatcagcaataaaccagccagccggaagggccgagcgcagaagtggtcctgcaactttatccgcctccatccagtctattaattgttgccgggaagctagagtaagtagttcgccagttaatagtttgcgcaacgttgttgccattgctacaggcatcgtggtgtcacgctcgtcgtttggtatggcttcattcagctccggttcccaacgatcaaggcgagttacatgatcccccatgttgtgcaaaaaagcggttagctccttcggtcctccgatcgttgtcagaagtaagttggccgcagtgttatcactcatggttatggcagcactgcataattctcttactgtcatgccatccgtaagatgcttttctgtgactggtgagtactcaaccaagtcattctgagaatagtgtatgcggcgaccgagttgctcttgcccggcgtcaatacgggataataccgcgccacatagcagaactttaaaagtgctcatcattggaaaacgttcttcggggcgaaaactctcaaggatcttaccgctgttgagatccagttcgatgtaacccactcgtgcacccaactgatcttcagcatcttttactttcaccagcgtttctgggtgagcaaaaacaggaaggcaaaatgccgcaaaaaagggaataagggcgacacggaaatgttgaatactcatactcttcctttttcaatattattgaagcatttatcagggttattgtctcatgagcggatacatatttgaatgtatttagaaaaataaacaaataggggttccgcgcacatttccccgaaaagtgccacctgacgtctaagaaaccattattatcatgacattaacctataaaaataggcgtatcacgaggccctttcgtc

SEQ ID NO: 110 - DNA, 366 bp, Artificial Sequence; identical to SEQ ID NO: 90
  Synthetic DNA

SEQ ID NO: 111 - DNA, 360 bp, Artificial Sequence; identical to SEQ ID NO: 92
  Synthetic DNA

SEQ ID NO: 112 - DNA, 375 bp, Artificial Sequence
  Synthetic DNA
gaggtgcagctgttggagtctgggggaggcttggtacagcctggggggtccctgagactctcctgtgcagcctctggattcacctttagcggctttgccatgaactgggtccgccaggctccagggaaggggctggagtgggtctcaactattagtaatagtgctggtagcacatattacgcagactccgtgaagggccggttcaccatctccagagacaattccaagaacacgctgtatctgcaaatgaacagcctgagagccgaggacacggccgtatattactgtgcgaaatatggggaggatattgtcgttgtgccagctcgctacggtgtggacgtctggggccagggcaccctggtcaccgtctcctca

SEQ ID NO: 113 - DNA, 378 bp, Artificial Sequence
  Synthetic DNA
gaggtgcagctgttggagtctgggggaggcttggtacagcctggggggtccctgagactctcctgtgcagcctctggattcacctttagcagctctgctgtgcagtgggtccgccaggctccagggaaggggctggagtgggtctcatggatcgtcgttggcagtggtaacacaaactacgcacagaagttccaggaacggttcaccatctccagagacaattccaagaacacgctgtatctgcaaatgaacagcctgagagccgaggacacggccgtatattactgtgcgaaagacgtccttgtagtaccagctgccccctactactactacggtatggacgtctggggccagggcaccctggtcaccgtctcctca

SEQ ID NO: 114 - DNA, 378 bp, Artificial Sequence
  Synthetic DNA
gaggtgcagctgttggagtctgggggaggcttggtacagcctggggggtccctgagactctcctgtgcagcctctggattcacctttagcactagtggagtgggtgtgggctgggtccgccaggctccagggaaggggctggagtgggtctcactcatttattggaatgatgataagcgctacagcccatctctgaagagccggttcaccatctccagagacaattccaagaacacgctgtatctgcaaatgaacagcctgagagccgaggacacggccgtatattactgtgcgaaagacgatggggcgtatgggccgtatagcagcgcctggacctttgactactggggccagggcaccctggtcaccgtctcctca

SEQ ID NO: 115 - DNA, 369 bp, Artificial Sequence
  Synthetic DNA
gaggtgcagctgttggagtctgggggaggcttggtacagcctggggggtccctgagactctcctgtgcagcctctggattcacctttagcactagtggaatgcgtgtgagctgggtccgccaggctccagggaaggggctggagtgggtctcacgcattgattgggatgatgataaattctacagcacatctctgaagacccggttcaccatctccagagacaattccaagaacacgctgtatctgcaaatgaacagcctgagagccgaggacacggccgtatattactgtgcgaaagatgacggtggcaccccgcccggggaattctttgactactggggccagggcaccctggtcaccgtctcctca

SEQ ID NO: 116 - DNA, 360 bp, Artificial Sequence
  Synthetic DNA
gaggtgcagctgttggagtctgggggaggcttggtacagcctggggggtccctgagactctcctgtgcagcctctggattcacctttagcgattatgccatgcactgggtccgccaggctccagggaaggggctggagtgggtctcaggtattagttggaatagtggtagcataggctatgcggactctgtgaagggccggttcaccatctccagagacaattccaagaacacgctgtatctgcaaatgaacagcctgagagccgaggacacggccgtatattactgtgcgaaaatagtgggagctacttacaactggttcgacccctggggccagggcaccctggtcaccgtctcctca

SEQ ID NO: 117 - DNA, 363 bp, Artificial Sequence
  Synthetic DNA
gaggtgcagctgttggagtctgggggaggcttggtacagcctggggggtccctgagactctcctgtgcagcctctggattcacctttagcaacgcctggatgagctgggtccgccaggctccagggaaggggctggagtgggtctcacgtattaaaagcaaaactgatggtgggacaacagactacgctgcacccgtgaaaggccggttcaccatctccagagacaattccaagaacacgctgtatctgcaaatgaacagcctgagagccgaggacacggccgtatattactgtgcgaaagaaaggggtagcagctcgtcctttgactactggggccagggcaccctggtcaccgtctcctca

SEQ ID NO: 118 - DNA, 366 bp, Artificial Sequence
  Synthetic DNA
gaggtgcagctgttggagtctgggggaggcttggtacagcctggggggtccctgagactctcctgtgcagcctctggattcacctttagcagctatggcatgcactgggtccgccaggctccagggaaggggctggagtgggtctcagttatatggtatgatggaagtaataaatactatgcagactccgtgaagggccggttcaccatctccagagacaattccaagaacacgctgtatctgcaaatgaacagcctgagagccgaggacacggccgtatattactgtgcgaaagatcttgtcttcgggccagctgctactccttttgactactggggccagggcaccctggtcaccgtctcctca

SEQ ID NO: 119 - DNA, 366 bp, Artificial Sequence
  Synthetic DNA
gaggtgcagctgttggagtctgggggaggcttggtacagcctggggggtccctgagactctcctgtgcagcctctggattcacctttagcagcaactacatgagctgggtccgccaggctccagggaaggggctggagtgggtctcagttatttatagcggtggtagcacatactacgcagactccgtgaagggccggttcaccatctccagagacaattccaagaacacgctgtatctgcaaatgaacagcctgagagccgaggacacggccgtatattactgtgcgaaagcgaagttctcctatggttcagggagttattactttgactactggggccagggcaccctggtcaccgtctcctca

SEQ ID NO: 120 - DNA, 372 bp, Artificial Sequence
  Synthetic DNA
gaggtgcagctgttggagtctgggggaggcttggtacagcctggggggtccctgagactctcctgtgcagcctctggattcacctttagcagctactggatgcactgggtccgccaggctccagggaaggggctggagtgggtctcacgtattaatagtgatgggagtagcacaagctacgcggactccgtgaagggccggttcaccatctccagagacaattccaagaacacgctgtatctgcaaatgaacagcctgagagccgaggacacggccgtatattactgtgcgaaaggatattgtagtagtaccagctgctatgctgatgcttttgatatctggggccagggcaccctggtcaccgtctcctca

SEQ ID NO: 121 - DNA, 354 bp, Artificial Sequence
  Synthetic DNA
gaggtgcagctgttggagtctgggggaggcttggtacagcctggggggtccctgagactctcctgtgcagcctctggattcacctttagcagtagtaactggtggggctgggtccgccaggctccagggaaggggctggagtgggtctcatacatctattatagtgggagcacctactacaacccgtccctcaagagtcggttcaccatctccagagacaattccaagaacacgctgtatctgcaaatgaacagcctgagagccgaggacacggccgtatattactgtgcgaaagatcgaagtagagggggttttgactactggggccagggcaccctggtcaccgtctcctca

SEQ ID NO: 122 - DNA, 363 bp, Artificial Sequence
  Synthetic DNA
gaggtgcagctgttggagtctgggggaggcttggtacagcctggggggtccctgagactctcctgtgcagcctctggattcacctttagcggttactactggagctgggtccgccaggctccagggaaggggctggagtgggtctcagaaatcaatcatagtggaagcaccaactacaacccgtccctcaagagtcggttcaccatctccagagacaattccaagaacacgctgtatctgcaaatgaacagcctgagagccgaggacacggccgtatattactgtgcgaaagcccgtaccagcgcgggcccgggtggtgcttttgatttctggggccagggcaccctggtcaccgtctcctca

SEQ ID NO: 123 - DNA, 384 bp, Artificial Sequence
  Synthetic DNA
gaggtgcagctgttggagtctgggggaggcttggtacagcctggggggtccctgagactctcctgtgcagcctctggattcacctttagcagctactggatcggctgggtccgccaggctccagggaaggggctggagtgggtctcaatcatctatcctggtgactctgataccagatacagcccgtccttccaaggccggttcaccatctccagagacaattccaagaacacgctgtatctgcaaatgaacagcctgagagccgaggacacggccgtatattactgtgcgaaaggggtttgtagtaccagctcgtacgccttttactactactactacggtatggacgtctggggccagggcaccctggtcaccgtctcctca

SEQ ID NO: 124 - DNA, 363 bp, Artificial Sequence
  Synthetic DNA
gaggtgcagctgttggagtctgggggaggcttggtacagcctggggggtccctgagactctcctgtgcagcctctggattcacctttagcagctatgctatgaattgggtccgccaggctccagggaaggggctggagtgggtctcatggatcaacaccaacactgggaacccaacgtatgcccagggcttcacaggacggttcaccatctccagagacaattccaagaacacgctgtatctgcaaatgaacagcctgagagccgaggacacggccgtatattactgtgcgaaagactacggtggtaactcctactggtacttcgatctctggggccagggcaccctggtcaccgtctcctca

SEQ ID NO: 125 - DNA, 14861 bp, Artificial Sequence
  Synthetic DNA
ctcgagagctcatgcggtaccgctagcgtttaaacctagtcactcctctacgctcctgtacatacgaggtgcagctgttggagtctgggggaggcttggtacagcctggggggtccctgagactctcctgtgcagcctctggattcacctttagcggctactatatgcactgggtccgccaggctccagggaaggggctggagtgggtctcatggatcaaccctaacagtggtggcacaaactatgcacagaagtttcagggccggttcaccatctccagagacaattccaagaacacgctgtatctgcaaatgaacagcctgagagccgaggacacggccgtatattactgtgcgaaaggttggggctatacggtgactaccctcaactggttcgacccctggggccagggcaccctggtcaccgtctcctcagtgcctggtgactcttccgcaatcagtcctgggacagaaacctcagggacagcctttatgagttttgatcacatctaacagagaggatgggccagcgtgtctctactcgcgtgtctctctatgcggaggtgcagctgttggagtctgggggaggcttggtacagcctggggggtccctgagactctcctgtgcagcctctggattcacctttagcagttatgatatcaactgggtccgccaggctccagggaaggggctggagtgggtctcatggatgaaccctaacagtggtaacacaggctatgcacagaagttccagggccggttcaccatctccagagacaattccaagaacacgctgtatctgcaaatgaacagcctgagagccgaggacacggccgtatattactgtgcgaaatccagcagctggcactactactacggtatggacgtctggggccagggcaccctggtcaccgtctcctcagtgcctggtgactcttccgcaatcagtcctgggacagaaacctcagggacagcctttatgagttttgatcacatctaacagagaggatgggccagatacgacgtatcacgtactacgtctagtacgaggtgcagctgttggagtctgggggaggcttggtacagcctggggggtccctgagactctcctgtgcagcctctggattcacctttagcgaattatccatgcactgggtccgccaggctccagggaaggggctggagtgggtctcaggttttgatcctgaagatggtgaaacaatctacgcacagaagttccagggccggttcaccatctccagagacaattccaagaacacgctgtatctgcaaatgaacagcctgagagccgaggacacggccgtatattactgtgcgaaaggaacctactactactactacggtatggacgtctggggccagggcaccctggtcaccgtctcctcagtgcctggtgactcttccgcaatcagtcctgggacagaaacctcagggacagcctttatgagttttgatcacatctaacagagaggatgggccagcgtagactagtacgagtatgtactctcgtggaggtgcagctgttggagtctgggggaggcttggtacagcctggggggtccctgagactctcctgtgcagcctctggattcacctttagcagctactatatgcactgggtccgccaggctccagggaaggggctggagtgggtctcaataatcaaccctagtggtggtagcacaagctacgcacagaagttccagggccggttcaccatctccagagacaattccaagaacacgctgtatctgcaaatgaacagcctgagagccgaggacacggccgtatattactgtgcgaaaagtttcagcagcagctggtacaactggttcgacccctggggccagggcaccctggtcaccgtctcctcagtgcctggtgactcttccgcaatcagtcctgggacagaaacctcagggacagcctttatgagttttgatcacatctaacagagaggatgggccagacgcgagtatactactatgtactgtacagtgaggtgcagctgttggagtctgggggaggcttggtacagcctggggggtccctgagactctcctgtgcagcctctggattcacctttagcagctatgctatcagctgggtccgccaggctccagggaaggggctggagtgggtctcagggatcatccctatctttggtacagcaaactacgcacagaagttccagggccggttcaccatctccagagacaattccaagaacacgctgtatctgcaaatgaacagcctgagagccgaggacacggccgtatattactgtgcgaaagggtccgtcctcggtgatgcttttgatatctggggccagggcaccctggtcaccgtctcctcagtgcctggtgactcttccgcaatcagtcctgggacagaaacctcagggacagcctttatgagttttgatcacatctaacagagaggatgggccagatagagtactcacgctacgtcagtagacgtgaggtgcagctgttggagtctgggggaggcttggtacagcctggggggtccctgagactctcctgtgcagcctctggattcacctttagcaatgctagaatgggtgtgagctgggtccgccaggctccagggaaggggctggagtgggtctcacacattttttcgaatgacgaaaaatcctacagcacatctctgaagagccggttcaccatctccagagacaattccaagaacacgctgtatctgcaaatgaacagcctgagagccgaggacacggccgtatattactgtgcgaaaatcccgtatgaagcagtggctggctactttgactactggggccagggcaccctggtcaccgtctcctcagtgcctggtgactcttccgcaatcagtcctgggacagaaacctcagggacagcctttatgagttttgatcacatctaacagagaggatgggccagtacgctgtcttagtgtagattcgatcacgtgaggtgcagctgttggagtctgggggaggcttggtacagcctggggggtccctgagactctcctgtgcagcctctggattcacctttagcagctattggatgagctgggtccgccaggctccagggaaggggctggagtgggtctcaaacataaagcaagatggaagtgagaaatactatgtggactctgtgaagggccggttcaccatctccagagacaattccaagaacacgctgtatctgcaaatgaacagcctgagagccgaggacacggccgtatattactgtgcgaaagttacggtgaccgggacctggtacttcgatctctggggccagggcaccctggtcaccgtctcctcagtgcctggtgactcttccgcaatcagtcctgggacagaaacctcagggacagcctttatgagttttgatcacatctaacagagaggatgggccagtgacgtatgttgtgagtagtacagtatatagaggtgcagctgttggagtctgggggaggcttggtacagcctggggggtccctgagactctcctgtgcagcctctggattcacctttagcagctacgacatgcactgggtccgccaggctccagggaaggggctggagtgggtctcagctattggtactgctggtgacacatactatccaggctccgtgaagggccggttcaccatctccagagacaattccaagaacacgctgtatctgcaaatgaacagcctgagagccgaggacacggccgtatattactgtgcgaaagcggatacagctatggtcatttactactactactacggtatggacgtctggggccagggcaccctggtcaccgtctcctcagtgcctggtgactcttccgcaatcagtcctgggacagaaacctcagggacagcctttatgagttttgatcacatctaacagagaggatgggccagagtatacataagtcgagagaagtgctacgagaggtgcagctgttggagtctgggggaggcttggtacagcctggggggtccctgagactctcctgtgcagcctctggattcacctttagcagctatagcatgaactgggtccgccaggctccagggaaggggctggagtgggtctcatccattagtagtagtagtagttacatatactacgcagactcagtgaagggccggttcaccatctccagagacaattccaagaacacgctgtatctgcaaatgaacagcctgagagccgaggacacggccgtatattactgtgcgaaagagaatagtggctatgattactttgactactggggccagggcaccctggtcaccgtctcctcagtgcctggtgactcttccgcaatcagtcctgggacagaaacctcagggacagcctttatgagttttgatcacatctaacagagaggatgggccagcgtacagtcacgtactcagactacgctctagaggtgcagctgttggagtctgggggaggcttggtacagcctggggggtccctgagactctcctgtgcagcctctggattcacctttagcgattatgctatgagctgggtccgccaggctccagggaaggggctggagtgggtctcattcattagaagcaaagcttatggtgggacaacagaatacaccgcgtctgtgaaaggccggttcaccatctccagagacaattccaagaacacgctgtatctgcaaatgaacagcctgagagccgaggacacggccgtatattactgtgcgaaagatctaggtagtggctttgactactggggccagggcaccctggtcaccgtctcctcagtgcctggtgactcttccgcaatcagtcctgggacagaaacctcagggacagcctttatgagttttgatcacatctaacagagaggatgggccagtatatatacatatgctagtatcacgcgagagaggtgcagctgttggagtctgggggaggcttggtacagcctggggggtccctgagactctcctgtgcagcctctggattcacctttagcgaccactacatggactgggtccgccaggctccagggaaggggctggagtgggtctcacgtactagaaacaaagctaacagttacaccacagaatacgccgcgtctgtgaaaggccggttcaccatctccagagacaattccaagaacacgctgtatctgcaaatgaacagcctgagagccgaggacacggccgtatattactgtgcgaaaggaggccaggggagccgatactactactactacggtatggacgtctggggccagggcaccctggtcaccgtctcctcagtgcctggtgactcttccgcaatcagtcctgggacagaaacctcagggacagcctttatgagttttgatcacatctaacagagaggatgggccagtgagtcagtatgtagtgtgatgtcacacgagaggtgcagctgttggagtctgggggaggcttggtacagcctggggggtccctgagactctcctgtgcagcctctggattcacctttagcagcaatgagatgagctgggtccgccaggctccagggaaggggctggagtgggtctcatccattagtggtggtagcacatactacgcagactccaggaagggccggttcaccatctccagagacaattccaagaacacgctgtatctgcaaatgaacagcctgagagccgaggacacggccgtatattactgtgcgaaagactcatatgatgcttttgatatctggggccagggcaccctggtcaccgtctcctcagtgcctggtgactcttccgcaatcagtcctgggacagaaacctcagggacagcctttatgagttttgatcacatctaacagagaggatgggccagacatgacgacacgacagctcacgtctcatcgaggtgcagctgttggagtctgggggaggcttggtacagcctggggggtccctgagactctcctgtgcagcctctggattcacctttagcagtggtggttactcctggagctgggtccgccaggctccagggaaggggctggagtgggtctcatacatctatcatagtgggagcacctactacaacccgtccctcaagagtcggttcaccatctccagagacaattccaagaacacgctgtatctgcaaatgaacagcctgagagccgaggacacggccgtatattactgtgcgaaagatgcgagtaaccatttctttgactactggggccagggcaccctggtcaccgtctcctcagtgcctggtgactcttccgcaatcagtcctgggacagaaacctcagggacagcctttatgagttttgatcacatctaacagagaggatgggccagagcgactagcagtagtgatcagtgacacacgaggtgcagctgttggagtctgggggaggcttggtacagcctggggggtccctgagactctcctgtgcagcctctggattcacctttagcagtagtagttactactggggctgggtccgccaggctccagggaaggggctggagtgggtctcaagtatctattatagtgggagcacctactacaacccgtccctcaagagtcggttcaccatctccagagacaattccaagaacacgctgtatctgcaaatgaacagcctgagagccgaggacacggccgtatattactgtgcgaaaaaggactggaacgacaactggttcgacccctggggccagggcaccctggtcaccgtctcctcagtgcctggtgactcttccgcaatcagtcctgggacagaaacctcagggacagcctttatgagttttgatcacatctaacagagaggatgggccagatctactgaccacgtagatccacgtgtcgcgaggtgcagctgttggagtctgggggaggcttggtacagcctggggggtccctgagactctcctgtgcagcctctggattcacctttagcagcaacagtgctgcttggaactgggtccgccaggctccagggaaggggctggagtgggtctcaaggacatactacaggtccaagtggtataatgattatgcagtatctgtgaaaagtcggttcaccatctccagagacaattccaagaacacgctgtatctgcaaatgaacagcctgagagccgaggacacggccgtatattactgtgcgaaagatattgtagtagtaccagctgctatatactggtacttcgatctctggggccagggcaccctggtcaccgtctcctcagtgcctggtgactcttccgcaatcagtcctgggacagaaacctcagggacagcctttatgagttttgatcacatctaacagagaggatgggccaggtttaaacggtacctggccaggatccgctagcgagctcgtttaaacagcactgtagatcagacacgatatcgcgaggaggtgcagctgttggagtctgggggaggcttggtacagcctggggggtccctgagactctcctgtgcagcctctggattcacctttagcagctatgctatgcattgggtccgccaggctccagggaaggggctggagtgggtctcatggatcaacgctggcaatggtaacacaaaatattcacagaagttccagggccggttcaccatctccagagacaattccaagaacacgctgtatctgcaaatgaacagcctgagagccgaggacacggccgtatattactgtgcgaaagcgtctagtagtggttattactacgtccactttgactactggggccagggcaccctggtcaccgtctcctcagtgcctggtgactcttccgcaatcagtcctgggacagaaacctcagggacagcctttatgagttttgatcacatctaacagagaggatgggccagtgatacgtctcatagtagtgcgagagatacgaggtgcagctgttggagtctgggggaggcttggtacagcctggggggtccctgagactctcctgtgcagcctctggattcacctttagcagctatggtatcagctgggtccgccaggctccagggaaggggctggagtgggtctcatggatcagcgcttacaatggtaacacaaactatgcacagaagctccagggccggttcaccatctccagagacaattccaagaacacgctgtatctgcaaatgaacagcctgagagccgaggacacggccgtatattactgtgcgaaagatttaaggttatcctattactactttgactactggggccagggcaccctggtcaccgtctcctcagtgcctggtgactcttccgcaatcagtcctgggacagaaacctcagggacagcctttatgagttttgatcacatctaacagagaggatgggccagtctacgtagctgtactactcacgactacaggaggtgcagctgttggagtctgggggaggcttggtacagcctggggggtccctgagactctcctgtgcagcctctggattcacctttagcggctttgccatgaactgggtccgccaggctccagggaaggggctggagtgggtctcaactattagtaatagtgctggtagcacatattacgcagactccgtgaagggccggttcaccatctccagagacaattccaagaacacgctgtatctgcaaatgaacagcctgagagccgaggacacggccgtatattactgtgcgaaatatggggaggatattgtcgttgtgccagctcgctacggtgtggacgtctggggccagggcaccctggtcaccgtctcctcagtgcctggtgactcttccgcaatcagtcctgggacagaaacctcagggacagcctttatgagttttgatcacatctaacagagaggatgggccagtagagacgagtcgtcgctcgacatacgcgtgaggtgcagctgttggagtctgggggaggcttggtacagcctggggggtccctgagactctcctgtgcagcctctggattcacctttagcagctctgctgtgcagtgggtccgccaggctccagggaaggggctggagtgggtctcatggatcgtcgttggcagtggtaacacaaactacgcacagaagttccaggaacggttcaccatctccagagacaattccaagaacacgctgtatctgcaaatgaacagcctgagagccgaggacacggccgtatattactgtgcgaaagacgtccttgtagtaccagctgccccctactactactacggtatggacgtctggggccagggcaccctggtcaccgtctcctcagtgcctggtgactcttccgcaatcagtcctgggacagaaacctcagggacagcctttatgagttttgatcacatctaacagagaggatgggccagagactatactagcgtcgtctagtacgctatgaggtgcagctgttggagtctgggggaggcttggtacagcctggggggtccctgagactctcctgtgcagcctctggattcacctttagcactagtggagtgggtgtgggctgggtccgccaggctccagggaaggggctggagtgggtctcactcatttattggaatgatgataagcgctacagcccatctctgaagagccggttcaccatctccagagacaattccaagaacacgctgtatctgcaaatgaacagcctgagagccgaggacacggccgtatattactgtgcgaaagacgatggggcgtatgggccgtatagcagcgcctggacctttgactactggggccagggcaccctggtcaccgtctcctcagtgcctggtgactcttccgcaatcagtcctgggacagaaacctcagggacagcctttatgagttttgatcacatctaacagagaggatgggccagcgacgtgacttacacacacttacagatcgtgaggtgcagctgttggagtctgggggaggcttggtacagcctggggggtccctgagactctcctgtgcagcctctggattcacctttagcactagtggaatgcgtgtgagctgggtccgccaggctccagggaaggggctggagtgggtctcacgcattgattgggatgatgataaattctacagcacatctctgaagacccggttcaccatctccagagacaattccaagaacacgctgtatctgcaaatgaacagcctgagagccgaggacacggccgtatattactgtgcgaaagatgacggtggcaccccgcccggggaattctttgactactggggccagggcaccctggtcaccgtctcctcagtgcctggtgactcttccgcaatcagtcctgggacagaaacctcagggacagcctttatgagttttgatcacatctaacagagaggatgggccagtcgcactagttctagcgacttctatactatgaggtgcagctgttggagtctgggggaggcttggtacagcctggggggtccctgagactctcctgtgcagcctctggattcacctttagcgattatgccatgcactgggtccgccaggctccagggaaggggctggagtgggtctcaggtattagttggaatagtggtagcataggctatgcggactctgtgaagggccggttcaccatctccagagacaattccaagaacacgctgtatctgcaaatgaacagcctgagagccgaggacacggccgtatattactgtgcgaaaatagtgggagctacttacaactggttcgacccctggggccagggcaccctggtcaccgtctcctcagtgcctggtgactcttccgcaatcagtcctgggacagaaacctcagggacagcctttatgagttttgatcacatctaacagagaggatgggccagacgcgatcgaactagcagtaagctcacgtagaggtgcagctgttggagtctgggggaggcttggtacagcctggggggtccctgagactctcctgtgcagcctctggattcacctttagcaacgcctggatgagctgggtccgccaggctccagggaaggggctggagtgggtctcacgtattaaaagcaaaactgatggtgggacaacagactacgctgcacccgtgaaaggccggttcaccatctccagagacaattccaagaacacgctgtatctgcaaatgaacagcctgagagccgaggacacggccgtatattactgtgcgaaagaaaggggtagcagctcgtcctttgactactggggccagggcaccctggtcaccgtctcctcagtgcctggtgactcttccgcaatcagtcctgggacagaaacctcagggacagcctttatgagttttgatcacatctaacagagaggatgggccagcgatcgtatacgcagtacgacgcgtatacagaggtgcagctgttggagtctgggggaggcttggtacagcctggggggtccctgagactctcctgtgcagcctctggattcacctttagcagctatggcatgcactgggtccgccaggctccagggaaggggctggagtgggtctcagttatatggtatgatggaagtaataaatactatgcagactccgtgaagggccggttcaccatctccagagacaattccaagaacacgctgtatctgcaaatgaacagcctgagagccgaggacacggccgtatattactgtgcgaaagatcttgtcttcgggccagctgctactccttttgactactggggccagggcaccctggtcaccgtctcctcagtgcctggtgactcttccgcaatcagtcctgggacagaaacctcagggacagcctttatgagttttgatcacatctaacagagaggatgggccagctatagcgtatacgtcatcatagtcgcatagaggtgcagctgttggagtctgggggaggcttggtacagcctggggggtccctgagactctcctgtgcagcctctggattcacctttagcagcaactacatgagctgggtccgccaggctccagggaaggggctggagtgggtctcagttatttatagcggtggtagcacatactacgcagactccgtgaagggccggttcaccatctccagagacaattccaagaacacgctgtatctgcaaatgaacagcctgagagccgaggacacggccgtatattactgtgcgaaagcgaagttctcctatggttcagggagttattactttgactactggggccagggcaccctggtcaccgtctcctcagtgcctggtgactcttccgcaatcagtcctgggacagaaacctcagggacagcctttatgagttttgatcacatctaacagagaggatgggccagtcgatagtgatcgctgcgtatctgacgtcagaggtgcagctgttggagtctgggggaggcttggtacagcctggggggtccctgagactctcctgtgcagcctctggattcacctttagcagctactggatgcactgggtccgccaggctccagggaaggggctggagtgggtctcacgtattaatagtgatgggagtagcacaagctacgcggactccgtgaagggccggttcaccatctccagagacaattccaagaacacgctgtatctgcaaatgaacagcctgagagccgaggacacggccgtatattactgtgcgaaaggatattgtagtagtaccagctgctatgctgatgcttttgatatctggggccagggcaccctggtcaccgtctcctcagtgcctggtgactcttccgcaatcagtcctgggacagaaacctcagggacagcctttatgagttttgatcacatctaacagagaggatgggccagtgtcgtcgcaacacatacgcacagtcgtgcgaggtgcagctgttggagtctgggggaggcttggtacagcctggggggtccctgagactctcctgtgcagcctctggattcacctttagcagtagtaactggtggggctgggtccgccaggctccagggaaggggctggagtgggtctcatacatctattatagtgggagcacctactacaacccgtccctcaagagtcggttcaccatctccagagacaattccaagaacacgctgtatctgcaaatgaacagcctgagagccgaggacacggccgtatattactgtgcgaaagatcgaagtagagggggttttgactactggggccagggcaccctggtcaccgtctcctcagtgcctggtgactcttccgcaatcagtcctgggacagaaacctcagggacagcctttatgagttttgatcacatctaacagagaggatgggccagactcatctacactcgcgcacagagcgtcacgaggtgcagctgttggagtctgggggaggcttggtacagcctggggggtccctgagactctcctgtgcagcctctggattcacctttagcggttactactggagctgggtccgccaggctccagggaaggggctggagtgggtctcagaaatcaatcatagtggaagcaccaactacaacccgtccctcaagagtcggttcaccatctccagagacaattccaagaacacgctgtatctgcaaatgaacagcctgagagccgaggacacggccgtatattactgtgcgaaagcccgtaccagcgcgggcccgggtggtgcttttgatttctggggccagggcaccctggtcaccgtctcctcagtgcctggtgactcttccgcaatcagtcctgggacagaaacctcagggacagcctttatgagttttgatcacatctaacagagaggatgggccagagtgtatgtcatagatagacatatagtcgcgaggtgcagctgttggagtctgggggaggcttggtacagcctggggggtccctgagactctcctgtgcagcctctggattcacctttagcagctactggatcggctgggtccgccaggctccagggaaggggctggagtgggtctcaatcatctatcctggtgactctgataccagatacagcccgtccttccaaggccggttcaccatctccagagacaattccaagaacacgctgtatctgcaaatgaacagcctgagagccgaggacacggccgtatattactgtgcgaaaggggtttgtagtaccagctcgtacgccttttactactactactacggtatggacgtctggggccagggcaccctggtcaccgtctcctcagtgcctggtgactcttccgcaatcagtcctgggacagaaacctcagggacagcctttatgagttttgatcacatctaacagagaggatgggccagcatactctaccgacactatccgagacgcgcgaggtgcagctgttggagtctgggggaggcttggtacagcctggggggtccctgagactctcctgtgcagcctctggattcacctttagcagctatgctatgaattgggtccgccaggctccagggaaggggctggagtgggtctcatggatcaacaccaacactgggaacccaacgtatgcccagggcttcacaggacggttcaccatctccagagacaattccaagaacacgctgtatctgcaaatgaacagcctgagagccgaggacacggccgtatattactgtgcgaaagactacggtggtaactcctactggtacttcgatctctggggccagggcaccctggtcaccgtctcctcagtgcctggtgactcttccgcaatcagtcctgggacagaaacctcagggacagcctttatgagttttgatcacatctaacagagaggatgggccaggtttaaacggtacctggccaccatggccgcggatgcggcgcgccatcgatatgcgtcgacatttaaat

SEQ ID NO: 126 - DNA, 22891 bp, Artificial Sequence
  Synthetic DNA
tcgcgcgtttcggtgatgacggtgaaaacctctgacacatgcagctcccggagacggtcacagcttgtctgtaagcggatgccgggagcagacaagcccgtcagggcgcgtcagcgggtgttggcgggtgtcggggctggcttaactatgcggcatcagagcagattgtactgagagtgcaccatatgcggtgtgaaataccgcacagatgcgtaaggagaaaataccgcatcaggcgccattcgccattcaggctgcgcaactgttgggaagggcgatcggtgcgggcctcttcgctattacgccagctggcgaaagggggatgtgctgcaaggcgattaagttgggtaacgccagggttttcccagtcacgacgttgtaaaacgacggccagtttcccgaagcgaaagccgcgtgttatttttgggtgggaaagccccgattcgctcctttttttttatttattatttttgttgtttttcgtgtctttttcttctccgttttgcagctgcggcctccaggtgtccccggccgtggtatttttgggtcgaaaaagccgctttttggctcacttggaaacctttcgggcgtctccaagcggagcgttggcgggaaatggtgttttttttgggttgttttcggtcccttttttcaccatttttgtggtttttcggcccattttcggcctcccccccccccccccccttcccgtggggctgcgctccgtggagcggaatggggtcgttaattaaggttaattggtttaattaatgggccgtgcagggagaagagggccgtgcggtggttgttagccctgattaatggcttggttgaggggagagtgtaattaagtgcttcgttagcactaattaatggcttgattgagaggagagtgtaattaaatgcttcataatccctaattaatggcttggttgagacaagagtgtaattaagtgcttcattagccctgattaatggcttggttgaggggagagtgtaattaaatgcttcgttagcactaattaatggcttgattgagaggagagtgtaattaaatgcttcataatccctaattaatggcttggttgagacaagagtgtaattaagtgcttcattagccctgattaatggcttggttgagaggagagtgtaattaaatgcttcattatccctaattagggactgaattccaaggagagtgtaattaagtgcttcattatccctaattaatggcttggttgagaggagagtgtaattaaatgctttgttagccctaattaatggtttgatggagaggagagtgtaattaagtgcttcattatccctaattaatggcttggttgaggggagagtgtaattaaatgcttagttagccctaattaatggcttggttgagaggagagtgtaattgaatgcttcattatccctaattagggattgaattgagaggagagtgtaattgaatgctttgttagccctaattagggattgaattgagaggagagtgtaattaaatgcctcattatccctaattagggattgaattgagaggagagtttaattaaatgcctcattatccctaattagggactgaattccgacgagagtgtaattaagtgcttcatttagccctaattaatggcttgattgagaggagagtgtaattaaatgcttcattatccctaattagggattgaattgagaggagagtgtaattaaatgcttcattatccctaattagggattgaattgagaggagagtgtaattaaatgcttcattatccctaattaatggcttggttgagaggggagtgtaattaagtgcttcgttatccctaattagggattgaattgtgaggagatggcaattaatacttcattatccctaattaatttaattagtccctattatccctaatttaattcatggtttggttgatggaagaatgtaattaaatgctttgttatccctaattaatggtttgattgagcggagagtgtaattaaatgcttcattatcccttattaatggttgtgtggaatgtagtgtaattagaagtccctaattaatggtttaattgagagaagactgcaattagatgactcatagcccctaataagtggtttaattatgagataatcacaattacatgtttcattgtccctaattaatcgtttaattgcgagaagatcacaattaattaaatgatccctaattgctaccgttcgtataatgtatactatacgaagttattttatttgtgaaatttgtgatgctattgctttatttgtaaccattataagctgcaataaacaagttggggtgggcgaagaactccagcatgagatccccgcgctggaggatcatccagccggcgtcccggaaaacgattccgaagcccaacctttcatagaaggcggcggtggaatcgaaatctcgtgatggcaggttgggcgtcgcttggtcggtcatttcgaaccccagagtcccgctcagaagaactcgtcaagaaggcgatagaaggcgatgcgctgcgaatcgggagcggcgataccgtaaagcacgaggaagcggtcagcccattcgccgccaagctcttcagcaatatcacgggtagccaacgctatgtcctgatagcggtccgccacacccagccggccacagtcgatgaatccagaaaagcggccattttccaccatgatattcggcaagcaggcatcgccatgggtcacgacgagatcctcgccgtcgggcatgcgcgccttgagcctggcgaacagttcggctggcgcgagcccctgatgctcttcgtccagatcatcctgatcgacaagaccggcttccatccgagtacgtgctcgctcgatgcgatgtttcgcttggtggtcgaatgggcaggtagccggatcaagcgtatgcagccgccgcattgcatcagccatgatggatactttctcggcaggagcaaggtgagatgacaggagatcctgccccggcacttcgcccaatagcagccagtcccttcccgcttcagtgacaacgtcgagcacagctgcgcaaggaacgcccgtcgtggccagccacgatagccgcgctgcctcgtcctgcagttcattcagggcaccggacaggtcggtcttgacaaaaagaaccgggcgcccctgcgctgacagccggaacacggcggcatcagagcagccgattgtctgttgtgcccagtcatagccgaatagcctctccacccaagcggccggagaacctgcgtgcaatccatcttgttcaatcatgcgaaacgatcctcatcctgtctcttgatcagatccgaaaatggatatacaagctcccgggagctttttgcaaaagcctaggcctccaaaaaagcctcctcactacttctggaatagctcagaggcagaggcggcctcggcctctgcataaataaaaaaaattagtcagccatggggcggagaatgggcggaactgggcggagttaggggcgggatgggcggagttaggggcgggactatggttgctgactaattgagatgcatgctttgcatacttctgcctgctggggagcctggggactttccacacctggttgctgactaattgagatgcatgctttgcatacttctgcctgctggggagcctggggactttccacaccctaaataacttcgtataatgtatactatacgaacggtagcgttaactcgagagctcatgcggtaccgctagcgtttaaacctagtcactcctctacgctcctgtacatacgaggtgcagctgttggagtctgggggaggcttggtacagcctggggggtccctgagactctcctgtgcagcctctggattcacctttagcggctactatatgcactgggtccgccaggctccagggaaggggctggagtgggtctcatggatcaaccctaacagtggtggcacaaactatgcacagaagtttcagggccggttcaccatctccagagacaattccaagaacacgctgtatctgcaaatgaacagcctgagagccgaggacacggccgtatattactgtgcgaaaggttggggctatacggtgactaccctcaactggttcgacccctggggccagggcaccctggtcaccgtctcctcagtgcctggtgactcttccgcaatcagtcctgggacagaaacctcagggacagcctttatgagttttgatcacatctaacagagaggatgggccagcgtgtctctactcgcgtgtctctctatgcggaggtgcagctgttggagtctgggggaggcttggtacagcctggggggtccctgagactctcctgtgcagcctctggattcacctttagcagttatgatatcaactgggtccgccaggctccagggaaggggctggagtgggtctcatggatgaaccctaacagtggtaacacaggctatgcacagaagttccagggccggttcaccatctccagagacaattccaagaacacgctgtatctgcaaatgaacagcctgagagccgaggacacggccgtatattactgtgcgaaatccagcagctggcactactactacggtatggacgtctggggccagggcaccctggtcaccgtctcctcagtgcctggtgactcttccgcaatcagtcctgggacagaaacctcagggacagcctttatgagttttgatcacatctaacagagaggatgggccagatacgacgtatcacgtactacgtctagtacgaggtgcagctgttggagtctgggggaggcttggtacagcctggggggtccctgagactctcctgtgcagcctctggattcacctttagcgaattatccatgcactgggtccgccaggctccagggaaggggctggagtgggtctcaggttttgatcctgaagatggtgaaacaatctacgcacagaagttccagggccggttcaccatctccagagacaattccaagaacacgctgtatctgcaaatgaacagcctgagagccgaggacacggccgtatattactgtgcgaaaggaacctactactactactacggtatggacgtctggggccagggcaccctggtcaccgtctcctcagtgcctggtgactcttccgcaatcagtcctgggacagaaacctcagggacagcctttatgagttttgatcacatctaacagagaggatgggccagcgtagactagtacgagtatgtactctcgtggaggtgcagctgttggagtctgggggaggcttggtacagcctggggggtccctgagactctcctgtgcagcctctggattcacctttagcagctactatatgcactgggtccgccaggctccagggaaggggctggagtgggtctcaataatcaaccctagtggtggtagcacaagctacgcacagaagttccagggccggttcaccatctccagagacaattccaagaacacgctgtatctgcaaatgaacagcctgagagccgaggacacggccgtatattactgtgcgaaaagtttcagcagcagctggtacaactggttcgacccctggggccagggcaccctggtcaccgtctcctcagtgcctggtgactcttccgcaatcagtcctgggacagaaacctcagggacagcctttatgagttttgatcacatctaacagagaggatgggccagacgcgagtatactactatgtactgtacagtgaggtgcagctgttggagtctgggggaggcttggtacagcctggggggtccctgagactctcctgtgcagcctctggattcacctttagcagctatgctatcagctgggtccgccaggctccagggaaggggctggagtgggtctcagggatcatccctatctttggtacagcaaactacgcacagaagttccagggccggttcaccatctccagagacaattccaagaacacgctgtatctgcaaatgaacagcctgagagccgaggacacggccgtatattactgtgcgaaagggtccgtcctcggtgatgcttttgatatctggggccagggcaccctggtcaccgtctcctcagtgcctggtgactcttccgcaatcagtcctgggacagaaacctcagggacagcctttatgagttttgatcacatctaacagagaggatgggccagatagagtactcacgctacgtcagtagacgtgaggtgcagctgttggagtctgggggaggcttggtacagcctggggggtccctgagactctcctgtgcagcctctggattcacctttagcaatgctagaatgggtgtgagctgggtccgccaggctccagggaaggggctggagtgggtctcacacattttttcgaatgacgaaaaatcctacagcacatctctgaagagccggttcaccatctccagagacaattccaagaacacgctgtatctgcaaatgaacagcctgagagccgaggacacggccgtatattactgtgcgaaaatcccgtatgaagcagtggctggctactttgactactggggccagggcaccctggtcaccgtctcctcagtgcctggtgactcttccgcaatcagtcctgggacagaaacctcagggacagcctttatgagttttgatcacatctaacagagaggatgggccagtacgctgtcttagtgtagattcgatcacgtgaggtgcagctgttggagtctgggggaggcttggtacagcctggggggtccctgagactctcctgtgcagcctctggattcacctttagcagctattggatgagctgggtccgccaggctccagggaaggggctggagtgggtctcaaacataaagcaagatggaagtgagaaatactatgtggactctgtgaagggccggttcaccatctccagagacaattccaagaacacgctgtatctgcaaatgaacagcctgagagccgaggacacggccgtatattactgtgcgaaagttacggtgaccgggacctggtacttcgatctctggggccagggcaccctggtcaccgtctcctcagtgcctggtgactcttccgcaatcagtcctgggacagaaacctcagggacagcctttatgagttttgatcacatctaacagagaggatgggccagtgacgtatgttgtgagtagtacagtatatagaggtgcagctgttggagtctgggggaggcttggtacagcctggggggtccctgagactctcctgtgcagcctctggattcacctttagcagctacgacatgcactgggtccgccaggctccagggaaggggctggagtgggtctcagctattggtactgctggtgacacatactatccaggctccgtgaagggccggttcaccatctccagagacaattccaagaacacgctgtatctgcaaatgaacagcctgagagccgaggacacggccgtatattactgtgcgaaagcggatacagctatggtcatttactactactactacggtatggacgtctggggccagggcaccctggtcaccgtctcctcagtgcctggtgactcttccgcaatcagtcctgggacagaaacctcagggacagcctttatgagttttgatcacatctaacagagaggatgggccagagtatacataagtcgagagaagtgctacgagaggtgcagctgttggagtctgggggaggcttggtacagcctggggggtccctgagactctcctgtgcagcctctggattcacctttagcagctatagcatgaactgggtccgccaggctccagggaaggggctggagtgggtctcatccattagtagtagtagtagttacatatactacgcagactcagtgaagggccggttcaccatctccagagacaattccaagaacacgctgtatctgcaaatgaacagcctgagagccgaggacacggccgtatattactgtgcgaaagagaatagtggctatgattactttgactactggggccagggcaccctggtcaccgtctcctcagtgcctggtgactcttccgcaatcagtcctgggacagaaacctcagggacagcctttatgagttttgatcacatctaacagagaggatgggccagcgtacagtcacgtactcagactacgctctagaggtgcagctgttggagtctgggggaggcttggtacagcctggggggtccctgagactctcctgtgcagcctctggattcacctttagcgattatgctatgagctgggtccgccaggctccagggaaggggctggagtgggtctcattcattagaagcaaagcttatggtgggacaacagaatacaccgcgtctgtgaaaggccggttcaccatctccagagacaattccaagaacacgctgtatctgcaaatgaacagcctgagagccgaggacacggccgtatattactgtgcgaaagatctaggtagtggctttgactactggggccagggcaccctggtcaccgtctcctcagtgcctggtgactcttccgcaatcagtcctgggacagaaacctcagggacagcctttatgagttttgatcacatctaacagagaggatgggccagtatatatacatatgctagtatcacgcgagagaggtgcagctgttggagtctgggggaggcttggtacagcctggggggtccctgagactctcctgtgcagcctctggattcacctttagcgaccactacatggactgggtccgccaggctccagggaaggggctggagtgggtctcacgtactagaaacaaagctaacagttacaccacagaatacgccgcgtctgtgaaaggccggttcaccatctccagagacaattccaagaacacgctgtatctgcaaatgaacagcctgagagccgaggacacggccgtatattactgtgcgaaaggaggccaggggagccgatactactactactacggtatggacgtctggggccagggcaccctggtcaccgtctcctcagtgcctggtgactcttccgcaatcagtcctgggacagaaacctcagggacagcctttatgagttttgatcacatctaacagagaggatgggccagtgagtcagtatgtagtgtgatgtcacacgagaggtgcagctgttggagtctgggggaggcttggtacagcctggggggtccctgagactctcctgtgcagcctctggattcacctttagcagcaatgagatgagctgggtccgccaggctccagggaaggggctggagtgggtctcatccattagtggtggtagcacatactacgcagactccaggaagggccggttcaccatctccagagacaattccaagaacacgctgtatctgcaaatgaacagcctgagagccgaggacacggccgtatattactgtgcgaaagactcatatgatgcttttgatatctggggccagggcaccctggtcaccgtctcctcagtgcctggtgactcttccgcaatcagtcctgggacagaaacctcagggacagcctttatgagttttgatcacatctaacagagaggatgggccagacatgacgacacgacagctcacgtctcatcgaggtgcagctgttggagtctgggggaggcttggtacagcctggggggtccctgagactctcctgtgcagcctctggattcacctttagcagtggtggttactcctggagctgggtccgccaggctccagggaaggggctggagtgggtctcatacatctatcatagtgggagcacctactacaacccgtccctcaagagtcggttcaccatctccagagacaattccaagaacacgctgtatctgcaaatgaacagcctgagagccgaggacacggccgtatattactgtgcgaaagatgcgagtaaccatttctttgactactggggccagggcaccctggtcaccgtctcctcagtgcctggtgactcttccgcaatcagtcctgggacagaaacctcagggacagcctttatgagttttgatcacatctaacagagaggatgggccagagcgactagcagtagtgatcagtgacacacgaggtgcagctgttggagtctgggggaggcttggtacagcctggggggtccctgagactctcctgtgcagcctctggattcacctttagcagtagtagttactactggggctgggtccgccaggctccagggaaggggctggagtgggtctcaagtatctattatagtgggagcacctactacaacccgtccctcaagagtcggttcaccatctccagagacaattccaagaacacgctgtatctgcaaatgaacagcctgagagccgaggacacggccgtatattactgtgcgaaaaaggactggaacgacaactggttcgacccctggggccagggcaccctggtcaccgtctcctcagtgcctggtgactcttccgcaatcagtcctgggacagaaacctcagggacagcctttatgagttttgatcacatctaacagagaggatgggccagatctactgaccacgtagatccacgtgtcgcgaggtgcagctgttggagtctgggggaggcttggtacagcctggggggtccctgagactctcctgtgcagcctctggattcacctttagcagcaacagtgctgcttggaactgggtccgccaggctccagggaaggggctggagtgggtctcaaggacatactacaggtccaagtggtataatgattatgcagtatctgtgaaaagtcggttcaccatctccagagacaattccaagaacacgctgtatctgcaaatgaacagcctgagagccgaggacacggccgtatattactgtgcgaaagatattgtagtagtaccagctgctatatactggtacttcgatctctggggccagggcaccctggtcaccgtctcctcagtgcctggtgactcttccgcaatcagtcctgggacagaaacctcagggacagcctttatgagttttgatcacatctaacagagaggatgggccaggtttaaacggtacctggccaggatccgctagcgagctcgtttaaacagcactgtagatcagacacgatatcgcgaggaggtgcagctgttggagtctgggggaggcttggtacagcctggggggtccctgagactctcctgtgcagcctctggattcacctttagcagctatgctatgcattgggtccgccaggctccagggaaggggctggagtgggtctcatggatcaacgctggcaatggtaacacaaaatattcacagaagttccagggccggttcaccatctccagagacaattccaagaacacgctgtatctgcaaatgaacagcctgagagccgaggacacggccgtatattactgtgcgaaagcgtctagtagtggttattactacgtccactttgactactggggccagggcaccctggtcaccgtctcctcagtgcctggtgactcttccgcaatcagtcctgggacagaaacctcagggacagcctttatgagttttgatcacatctaacagagaggatgggccagtgatacgtctcatagtagtgcgagagatacgaggtgcagctgttggagtctgggggaggcttggtacagcctggggggtccctgagactctcctgtgcagcctctggattcacctttagcagctatggtatcagctgggtccgccaggctccagggaaggggctggagtgggtctcatggatcagcgcttacaatggtaacacaaactatgcacagaagctccagggccggttcaccatctccagagacaattccaagaacacgctgtatctgcaaatgaacagcctgagagccgaggacacggccgtatattactgtgcgaaagatttaaggttatcctattactactttgactactggggccagggcaccctggtcaccgtctcctcagtgcctggtgactcttccgcaatcagtcctgggacagaaacctcagggacagcctttatgagttttgatcacatctaacagagaggatgggccagtctacgtagctgtactactcacgactacaggaggtgcagctgttggagtctgggggaggcttggtacagcctggggggtccctgagactctcctgtgcagcctctggattcacctttagcggctttgccatgaactgggtccgccaggctccagggaaggggctggagtgggtctcaactattagtaatagtgctggtagcacatattacgcagactccgtgaagggccggttcaccatctccagagacaattccaagaacacgctgtatctgcaaatgaacagcctgagagccgaggacacggccgtatattactgtgcgaaatatggggaggatattgtcgttgtgccagctcgctacggtgtggacgtctggggccagggcaccctggtcaccgtctcctcagtgcctggtgactcttccgcaatcagtcctgggacagaaacctcagggacagcctttatgagttttgatcacatctaacagagaggatgggccagtagagacgagtcgtcgctcgacatacgcgtgaggtgcagctgttggagtctgggggaggcttggtacagcctggggggtccctgagactctcctgtgcagcctctggattcacctttagcagctctgctgtgcagtgggtccgccaggctccagggaaggggctggagtgggtctcatggatcgtcgttggcagtggtaacacaaactacgcacagaagttccaggaacggttcaccatctccagagacaattccaagaacacgctgtatctgcaaatgaacagcctgagagccgaggacacggccgtatattactgtgcgaaagacgtccttgtagtaccagctgccccctactactactacggtatggacgtctggggccagggcaccctggtcaccgtctcctcagtgcctggtgactcttccgcaatcagtcctgggacagaaacctcagggacagcctttatgagttttgatcacatctaacagagaggatgggccagagactatactagcgtcgtctagtacgctatgaggtgcagctgttggagtctgggggaggcttggtacagcctggggggtccctgagactctcctgtgcagcctctggattcacctttagcactagtggagtgggtgtgggctgggtccgccaggctccagggaaggggctggagtgggtctcactcatttattggaatgatgataagcgctacagcccatctctgaagagccggttcaccatctccagagacaattccaagaacacgctgtatctgcaaatgaacagcctgagagccgaggacacggccgtatattactgtgcgaaagacgatggggcgtatgggccgtatagcagcgcctggacctttgactactggggccagggcaccctggtcaccgtctcctcagtgcctggtgactcttccgcaatcagtcctgggacagaaacctcagggacagcctttatgagttttgatcacatctaacagagaggatgggccagcgacgtgacttacacacacttacagatcgtgaggtgcagctgttggagtctgggggaggcttggtacagcctggggggtccctgagactctcctgtgcagcctctggattcacctttagcactagtggaatgcgtgtgagctgggtccgccaggctccagggaaggggctggagtgggtctcacgcattgattgggatgatgataaattctacagcacatctctgaagacccggttcaccatctccagagacaattccaagaacacgctgtatctgcaaatgaacagcctgagagccgaggacacggccgtatattactgtgcgaaagatgacggtggcaccccgcccggggaattctttgactactggggccagggcaccctggtcaccgtctcctcagtgcctggtgactcttccgcaatcagtcctgggacagaaacctcagggacagcctttatgagttttgatcacatctaacagagaggatgggccagtcgcactagttctagcgacttctatactatgaggtgcagctgttggagtctgggggaggcttggtacagcctggggggtccctgagactctcctgtgcagcctctggattcacctttagcgattatgccatgcactgggtccgccaggctccagggaaggggctggagtgggtctcaggtattagttggaatagtggtagcataggctatgcggactctgtgaagggccggttcaccatctccagagacaattccaagaacacgctgtatctgcaaatgaacagcctgagagccgaggacacggccgtatattactgtgcgaaaatagtgggagctacttacaactggttcgacccctggggccagggcaccctggtcaccgtctcctcagtgcctggtgactcttccgcaatcagtcctgggacagaaacctcagggacagcctttatgagttttgatcacatctaacagagaggatgggccagacgcgatcgaactagcagtaagctcacgtagaggtgcagctgttggagtctgggggaggcttggtacagcctggggggtccctgagactctcctgtgcagcctctggattcacctttagcaacgcctggatgagctgggtccgccaggctccagggaaggggctggagtgggtctcacgtattaaaagcaaaactgatggtgggacaacagactacgctgcacccgtgaaaggccggttcaccatctccagagacaattccaagaacacgctgtatctgcaaatgaacagcctgagagccgaggacacggccgtatattactgtgcgaaagaaaggggtagcagctcgtcctttgactactggggccagggcaccctggtcaccgtctcctcagtgcctggtgactcttccgcaatcagtcctgggacagaaacctcagggacagcctttatgagttttgatcacatctaacagagaggatgggccagcgatcgtatacgcagtacgacgcgtatacagaggtgcagctgttggagtctgggggaggcttggtacagcctggggggtccctgagactctcctgtgcagcctctggattcacctttagcagctatggcatgcactgggtccgccaggctccagggaaggggctggagtgggtctcagttatatggtatgatggaagtaataaatactatgcagactccgtgaagggccggttcaccatctccagagacaattccaagaacacgctgtatctgcaaatgaacagcctgagagccgaggacacggccgtatattactgtgcgaaagatcttgtcttcgggccagctgctactccttttgactactggggccagggcaccctggtcaccgtctcctcagtgcctggtgactcttccgcaatcagtcctgggacagaaacctcagggacagcctttatgagttttgatcacatctaacagagaggatgggccagctatagcgtatacgtcatcatagtcgcatagaggtgcagctgttggagtctgggggaggcttggtacagcctggggggtccctgagactctcctgtgcagcctctggattcacctttagcagcaactacatgagctgggtccgccaggctccagggaaggggctggagtgggtctcagttatttatagcggtggtagcacatactacgcagactccgtgaagggccggttcaccatctccagagacaattccaagaacacgctgtatctgcaaatgaacagcctgagagccgaggacacggccgtatattactgtgcgaaagcgaagttctcctatggttcagggagttattactttgactactggggccagggcaccctggtcaccgtctcctcagtgcctggtgactcttccgcaatcagtcctgggacagaaacctcagggacagcctttatgagttttgatcacatctaacagagaggatgggccagtcgatagtgatcgctgcgtatctgacgtcagaggtgcagctgttggagtctgggggaggcttggtacagcctggggggtccctgagactctcctgtgcagcctctggattcacctttagcagctactggatgcactgggtccgccaggctccagggaaggggctggagtgggtctcacgtattaatagtgatgggagtagcacaagctacgcggactccgtgaagggccggttcaccatctccagagacaattccaagaacacgctgtatctgcaaatgaacagcctgagagccgaggacacggccgtatattactgtgcgaaaggatattgtagtagtaccagctgctatgctgatgcttttgatatctggggccagggcaccctggtcaccgtctcctcagtgcctggtgactcttccgcaatcagtcctgggacagaaacctcagggacagcctttatgagttttgatcacatctaacagagaggatgggccagtgtcgtcgcaacacatacgcacagtcgtgcgaggtgcagctgttggagtctgggggaggcttggtacagcctggggggtccctgagactctcctgtgcagcctctggattcacctttagcagtagtaactggtggggctgggtccgccaggctccagggaaggggctggagtgggtctcatacatctattatagtgggagcacctactacaacccgtccctcaagagtcggttcaccatctccagagacaattccaagaacacgctgtatctgcaaatgaacagcctgagagccgaggacacggccgtatattactgtgcgaaagatcgaagtagagggggttttgactactggggccagggcaccctggtcaccgtctcctcagtgcctggtgactcttccgcaatcagtcctgggacagaaacctcagggacagcctttatgagttttgatcacatctaacagagaggatgggccagactcatctacactcgcgcacagagcgtcacgaggtgcagctgttggagtctgggggaggcttggtacagcctggggggtccctgagactctcctgtgcagcctctggattcacctttagcggttactactggagctgggtccgccaggctccagggaaggggctggagtgggtctcagaaatcaatcatagtggaagcaccaactacaacccgtccctcaagagtcggttcaccatctccagagacaattccaagaacacgctgtatctgcaaatgaacagcctgagagccgaggacacggccgtatattactgtgcgaaagcccgtaccagcgcgggcccgggtggtgcttttgatttctggggccagggcaccctggtcaccgtctcctcagtgcctggtgactcttccgcaatcagtcctgggacagaaacctcagggacagcctttatgagttttgatcacatctaacagagaggatgggccagagtgtatgtcatagatagacatatagtcgcgaggtgcagctgttggagtctgggggaggcttggtacagcctggggggtccctgagactctcctgtgcagcctctggattcacctttagcagctactggatcggctgggtccgccaggctccagggaaggggctggagtgggtctcaatcatctatcctggtgactctgataccagatacagcccgtccttccaaggccggttcaccatctccagagacaattccaagaacacgctgtatctgcaaatgaacagcctgagagccgaggacacggccgtatattactgtgcgaaaggggtttgtagtaccagctcgtacgccttttactactactactacggtatggacgtctggggccagggcaccctggtcaccgtctcctcagtgcctggtgactcttccgcaatcagtcctgggacagaaacctcagggacagcctttatgagttttgatcacatctaacagagaggatgggccagcatactctaccgacactatccgagacgcgcgaggtgcagctgttggagtctgggggaggcttggtacagcctggggggtccctgagactctcctgtgcagcctctggattcacctttagcagctatgctatgaattgggtccgccaggctccagggaaggggctggagtgggtctcatggatcaacaccaacactgggaacccaacgtatgcccagggcttcacaggacggttcaccatctccagagacaattccaagaacacgctgtatctgcaaatgaacagcctgagagccgaggacacggccgtatattactgtgcgaaagactacggtggtaactcctactggtacttcgatctctggggccagggcaccctggtcaccgtctcctcagtgcctggtgactcttccgcaatcagtcctgggacagaaacctcagggacagcctttatgagttttgatcacatctaacagagaggatgggccaggtttaaacggtacctggccaccatggccgcggatgcggcgcgccatcgatatgcgtcgacatttaaatgttggcgcagaagggattcatatcaattaattccctgtcctcaattaatgcataattgggagtgcgatggaatcattcaataagtaatgaggacttggtgtcaaaatgccaattaagtaattaatgacacccaattaatacacaatggggattacagtggaataactcagtgaagttcatatctaaattgcaattgaataattaattacagctaattaatggatgggagactggcagtggtataacttaatgaaggaacacagtgaattcctgtctgaattgaaattaattgatttattagggctaattaatgaatggtggggttaaaaatagcattactcagcgaaggaacatgagttcatggctaaattgagattgaattattaattacaactaattgattaatgactgatgggagtaagaatggaataactcagtgaaggaacacaatggattcatggcctaattgaaattaaatggttaattagagctaattaatgaatgatggggggtggcaatggaatgatacaagaaagaaacacaatgggttcgtgtctacattgaaattaaataattaattacagctaattaataaacggcgaggttgacaatggtataactgtgaagagacagaatgagttcgtgactaaattggtattaaatgattaattagagctaattaacaggtggtggggctgagaatggcataactcaatgggggatgatgagctgatggcttaattggaattaataattaatcacaaccaattaacaggtgctgttaatggggttacaggggcatgacttcaggaagaagcacaaagtggccattaaataattaattgcacccaattaattcctgatggggattactgcagaggaactcagcgaaggattcaagcagaaatgacacagttaggttgctcaattgcgttaattaattaaaatcgctaattaggtgagcttcattaaggcctgatggggttcatcccaacgctgggatcaaagaactcagcgcagagtggataacgataattagaaggggacaaattaatgaggaaacacgactttgggcctagacggccattaaatcattaatcaacccgacgggcgcccaattaatcataaagttattaagcaattaagtcgaggctgacgagaaaccgcaacgagagccctccacgctcctttgagttggcgcaaacaacaaacaacgcgggctcgttaagcagcgacgacgccgagcgtaacgaagcaatccccgcgcccgacaattaacgcgctaacgaagccggagccctccttatgcaaattagcccctccagagggccataaaagcgccggctctccgacggcgcgggaggagcaccagtcggctccgcaaccatgagcccactcgtctcctccctcctgctcctggccgccctgccaggtgagggcgctgtggggctctatggggctctatggggtctcagcggggctctgcgggctcaatgggggccaaagggggggtctgcgggctctatgggggggtcaacggggggtctcacggggggccggctccgcgaggccgtgtggcggcggctccgtcagcgctctctgggcgcgcctccttccccacagggctgatggcggaggtgcagctgttggagtctgggggaggcttggtacagcctggggggtccctgagactctcctgtgcagcctctggattcacctttagcagctatgccatgagctgggtccgccaggctccagggaaggggctggagtgggtctcagctattagtggtagtggtggtagcacatactacgcagactccgtgaagggccggttcaccatctccagagacaattccaagaacacgctgtatctgcaaatgaacagcctgagagccgaggacacggccgtatattactgtgcgaaaggatatagtggctacgattactactttgactactggggccagggcaccctggtcaccgtctcctcaggtgagtcttcatatgaaccccccccaaaattgccgcggcgattttggggcaaaatcgggcgattttatggatccccgcggccgcaggcgtaatcatggtcatagctgtttcctgtgtgaaattgttatccgctcacaattccacacaacatacgagccggaagcataaagtgtaaagcctggggtgcctaatgagtgagctaactcacattaattgcgttgcgctcactgcccgctttccagtcgggaaacctgtcgtgccagctgcattaatgaatcggccaacgcgcggggagaggcggtttgcgtattgggcgctcttccgcttcctcgctcactgactcgctgcgctcggtcgttcggctgcggcgagcggtatcagctcactcaaaggcggtaatacggttatccacagaatcaggggataacgcaggaaagaacatgtgagcaaaaggccagcaaaaggccaggaaccgtaaaaaggccgcgttgctggcgtttttccataggctccgcccccctgacgagcatcacaaaaatcgacgctcaagtcagaggtggcgaaacccgacaggactataaagataccaggcgtttccccctggaagctccctcgtgcgctctcctgttccgaccctgccgcttaccggatacctgtccgcctttctcccttcgggaagcgtggcgctttctcatagctcacgctgtaggtatctcagttcggtgtaggtcgttcgctccaagctgggctgtgtgcacgaaccccccgttcagcccgaccgctgcgccttatccggtaactatcgtcttgagtccaacccggtaagacacgacttatcgccactggcagcagccactggtaacaggattagcagagcgaggtatgtaggcggtgctacagagttcttgaagtggtggcctaactacggctacactagaagaacagtatttggtatctgcgctctgctgaagccagttaccttcggaaaaagagttggtagctcttgatccggcaaacaaaccaccgctggtagcggtggtttttttgtttgcaagcagcagattacgcgcagaaaaaaaggatctcaagaagatcctttgatcttttctacggggtctgacgctcagtggaacgaaaactcacgttaagggattttggtcatgagattatcaaaaaggatcttcacctagatccttttaaattaaaaatgaagttttaaatcaatctaaagtatatatgagtaaacttggtctgacagttaccaatgcttaatcagtgaggcacctatctcagcgatctgtctatttcgttcatccatagttgcctgactccccgtcgtgtagataactacgatacgggagggcttaccatctggccccagtgctgcaatgataccgcgagacccacgctcaccggctccagatttatcagcaataaaccagccagccggaagggccgagcgcagaagtggtcctgcaactttatccgcctccatccagtctattaattgttgccgggaagctagagtaagtagttcgccagttaatagtttgcgcaacgttgttgccattgctacaggcatcgtggtgtcacgctcgtcgtttggtatggcttcattcagctccggttcccaacgatcaaggcgagttacatgatcccccatgttgtgcaaaaaagcggttagctccttcggtcctccgatcgttgtcagaagtaagttggccgcagtgttatcactcatggttatggcagcactgcataattctcttactgtcatgccatccgtaagatgcttttctgtgactggtgagtactcaaccaagtcattctgagaatagtgtatgcggcgaccgagttgctcttgcccggcgtcaatacgggataataccgcgccacatagcagaactttaaaagtgctcatcattggaaaacgttcttcggggcgaaaactctcaaggatcttaccgctgttgagatccagttcgatgtaacccactcgtgcacccaactgatcttcagcatcttttactttcaccagcgtttctgggtgagcaaaaacaggaaggcaaaatgccgcaaaaaagggaataagggcgacacggaaatgttgaatactcatactcttcctttttcaatattattgaagcatttatcagggttattgtctcatgagcggatacatatttgaatgtatttagaaaaataaacaaataggggttccgcgcacatttccccgaaaagtgccacctgacgtctaagaaaccattattatcatgacattaacctataaaaataggcgtatcacgaggccctttcgtc

SEQ ID NO: 127 - DNA, 333 bp, Artificial Sequence; identical to SEQ ID NO: 70
  Synthetic DNA

SEQ ID NO: 128 - DNA, 330 bp, Artificial Sequence
  Synthetic DNA
cagtctgccctgactcagcctgcctccgtgtctgggtctcctggacagtcgatcaccatctcctgctctggaagcagctccaacatcggaagtaatactgtaaactggtaccaacagcacccaggcaaagcccccaaactcatgatttatagtaataatcagcggccctcaggggtttctaatcgcttctctggctccaagtctggcaacacggcctccctgaccatctctgggctccaggctgaggacgaggctgattattactgcgcagcatgggatgacagcctgagtggtgtggttttcggcggagggaccaagctgaccgtccta

SEQ ID NO: 129 - DNA, 330 bp, Artificial Sequence
  Synthetic DNA
cagtctgccctgactcagcctgcctccgtgtctgggtctcctggacagtcgatcaccatctcctgctctggaagcagctccgacatggggaattatgcggtatcctggtaccaacagcacccaggcaaagcccccaaactcatgatttatgatgtcagtaagcggccctcaggggtttctaatcgcttctctggctccaagtctggcaacacggcctccctgaccatctctgggctccaggctgaggacgaggctgattattactgcagctcatatgaagacagcaacaatttgggggtattcggcggagggaccaagctgaccgtccta

SEQ ID NO: 130 - DNA, 342 bp, Artificial Sequence
  Synthetic DNA
cagtctgccctgactcagcctgcctccgtgtctgggtctcctggacagtcgatcaccatctcctgcactggaaccagcagtgacgttggtagttataaccgtgtctcctggtaccaacagcacccaggcaaagcccccaaactcatgatttatgaggtcagtaatcggccctcaggggtttctaatcgcttctctggctccaagtctggcaacacggcctccctgaccatctctgggctccaggctgaggacgaggctgattattactgcgcagcatgggatggcagcccggccccgagtgacttttatgtcttcggcggagggaccaagctgaccgtccta

SEQ ID NO: 131 - DNA, 348 bp, Artificial Sequence
  Synthetic DNA
cagtctgccctgactcagcctgcctccgtgtctgggtctcctggacagtcgatcaccatctcctgctctggagataaattgggggataaatatgcttgctggtaccaacagcacccaggcaaagcccccaaactcatgatttatcaagatagcaagcggccctcaggggtttctaatcgcttctctggctccaagtctggcaacacggcctccctgaccatctctgggctccaggctgaggacgaggctgattattactgccagtcctttgacaacagcctgtgccagtcctttgacaacagcctgaattatgtgcttttcggcggagggaccaagctgaccgtccta

SEQ ID NO: 132 - DNA, 330 bp, Artificial Sequence
  Synthetic DNA
cagtctgccctgactcagcctgcctccgtgtctgggtctcctggacagtcgatcaccatctcctgctctggagatgcattgccaaaaaaatatgcttattggtaccaacagcacccaggcaaagcccccaaactcatgatttatgaggacagcaaacgaccctccggggtttctaatcgcttctctggctccaagtctggcaacacggcctccctgaccatctctgggctccaggctgaggacgaggctgattattactgcgcagcatgggatgacagcctgaatggtcccttttatgtcttcggcggagggaccaagctgaccgtccta

SEQ ID NO: 133 - DNA, 324 bp, Artificial Sequence
  Synthetic DNA
cagtctgccctgactcagcctgcctccgtgtctgggtctcctggacagtcgatcaccatctcctgccaaggagacagcctcagaagctattatgcaagctggtaccaacagcacccaggcaaagcccccaaactcatgatttatggtaaaaacaaccggccctcaggggtttctaatcgcttctctggctccaagtctggcaacacggcctccctgaccatctctgggctccaggctgaggacgaggctgattattactgccagtcctatgacagcagcctgagtggtgtggtattcggcggagggaccaagctgaccgtccta

SEQ ID NO: 134 - DNA, 324 bp, Artificial Sequence
  Synthetic DNA
cagtctgccctgactcagcctgcctccgtgtctgggtctcctggacagtcgatcaccatctcctgctctggagatgtactgggggaaaattatgctgactggtaccaacagcacccaggcaaagcccccaaactcatgatttatgaagatagtgagcggtaccctggggtttctaatcgcttctctggctccaagtctggcaacacggcctccctgaccatctctgggctccaggctgaggacgaggctgattattactgcggaacatgggatagcagcctgagtggtgtggtattcggcggagggaccaagctgaccgtccta

SEQ ID NO: 135 - DNA, 321 bp, Artificial Sequence
  Synthetic DNA
cagtctgccctgactcagcctgcctccgtgtctgggtctcctggacagtcgatcaccatctcctgctcaggagatgtactggcaaaaaaatatgctcggtggtaccaacagcacccaggcaaagcccccaaactcatgatttataggaaaaacagccaactctcaggggtttctaatcgcttctctggctccaagtctggcaacacggcctccctgaccatctctgggctccaggctgaggacgaggctgattattactgctactctgcggctgacaacaatcttgtggtattcggcggagggaccaagctgaccgtccta

SEQ ID NO: 136 - DNA, 336 bp, Artificial Sequence; identical to SEQ ID NO: 73
  Synthetic DNA

SEQ ID NO: 137 - DNA, 348 bp, Artificial Sequence
  Synthetic DNA
cagtctgccctgactcagcctgcctccgtgtctgggtctcctggacagtcgatcaccatctcctgcaccttgcccagtgacatcaatgttggtagctacaacatatactggtaccaacagcacccaggcaaagcccccaaactcatgatttattactactcagactcagataagggccagggctctggggtttctaatcgcttctctggctccaagtctggcaacacggcctccctgaccatctctgggctccaggctgaggacgaggctgattattactgccactcatatgcaggcggcgacactttcgatgtggtgttcggcggagggaccaagctgaccgtccta

SEQ ID NO: 138 - DNA, 348 bp, Artificial Sequence
  Synthetic DNA
cagtctgccctgactcagcctgcctccgtgtctgggtctcctggacagtcgatcaccatctcctgcatgctgagcagtggcttcagtgttggggacttctggataaggtggtaccaacagcacccaggcaaagcccccaaactcatgatttattaccactcagactccaataagggccaaggctctggggtttctaatcgcttctctggctccaagtctggcaacacggcctccctgaccatctctgggctccaggctgaggacgaggctgattattactgcggtacatggcacagcaactctaagactcatgtggtattcggcggagggaccaagctgaccgtccta

SEQ ID NO: 139 - DNA, 330 bp, Artificial Sequence
  Synthetic DNA
cagtctgccctgactcagcctgcctccgtgtctgggtctcctggacagtcgatcaccatctcctgcgcttccagcactggagcagtcaccagtggttactatccaaactggtaccaacagcacccaggcaaagcccccaaactcatgatttatagtacaagcaacaaacactccggggtttctaatcgcttctctggctccaagtctggcaacacggcctccctgaccatctctgggctccaggctgaggacgaggctgattattactgcagctcatatacaatcaccgacatcgtggtcttcggcggagggaccaagctgaccgtccta

SEQ ID NO: 140 - DNA, 333 bp, Artificial Sequence
  Synthetic DNA
cagtctgccctgactcagcctgcctccgtgtctgggtctcctggacagtcgatcaccatctcctgcggcttgagctctggctcagtctctactagttactaccccagctggtaccaacagcacccaggcaaagcccccaaactcatgatttatagcacaaacactcgctcttctggggtttctaatcgcttctctggctccaagtctggcaacacggcctccctgaccatctctgggctccaggctgaggacgaggctgattattactgcgtgctgtatatgggtagtggcatttctgtggtattcggcggagggaccaagctgaccgtccta

SEQ ID NO: 141 - DNA, 333 bp, Artificial Sequence
  Synthetic DNA
cagtctgccctgactcagcctgcctccgtgtctgggtctcctggacagtcgatcaccatctcctgcactgggaacagcaacaatgttggcaaccaaggagcagcttggtaccaacagcacccaggcaaagcccccaaactcatgatttataggaataacaaccggccctcaggggtttctaatcgcttctctggctccaagtctggcaacacggcctccctgaccatctctgggctccaggctgaggacgaggctgattattactgcgcagcatgggatgacagcctgagtgcccatgtggtattcggcggagggaccaagctgaccgtccta

SEQ ID NO: 142 - DNA, 13829 bp, Artificial Sequence
  Synthetic DNA
acgagtgcgtacgctcgacaagacgcactccagtctgccctgactcagcctgcctccgtgtctgggtctcctggacagtcgatcaccatctcctgctctggaagcagctccaacatcggaagtaattatgtatactggtaccaacagcacccaggcaaagcccccaaactcatgatttataggaataatcagcggccctcaggggtttctaatcgcttctctggctccaagtctggcaacacggcctccctgaccatctctgggctccaggctgaggacgaggctgattattactgcgcagcatgggatgacagcctgagtggtcattgggtgttcggcggagggaccaagctgaccgtcctagcctgacacacacagccctccccagactgtgggatgaggccctgtgcccgcagtcacatgtggaatatcaagacacacacatctatgacaatcaccgtgtctctactcgcgtgtctctctatgcgcagtctgccctgactcagcctgcctccgtgtctgggtctcctggacagtcgatcaccatctcctgcactgggagcagctccaacatcggggcaggttatgatgtacactggtaccaacagcacccaggcaaagcccccaaactcatgatttatggtaacagcaatcggccctcaggggtttctaatcgcttctctggctccaagtctggcaacacggcctccctgaccatctctgggctccaggctgaggacgaggctgattattactgccagtcctatgacagcagcctgagtggttctgtggtattcggcggagggaccaagctgaccgtcctagcctgacacacacagccctccccagactgtgggatgaggccctgtgcccgcagtcacatgtggaatatcaagacacacacatctatgacaatcacatacgacgtatcacgtactacgtctagtaccagtctgccctgactcagcctgcctccgtgtctgggtctcctggacagtcgatcaccatctcctgctctggaagcagctccaacattgggaataattatgtatcctggtaccaacagcacccaggcaaagcccccaaactcatgatttatgacaataataagcgaccctcaggggtttctaatcgcttctctggctccaagtctggcaacacggcctccctgaccatctctgggctccaggctgaggacgaggctgattattactgcggaacatgggatagcagcctgagtgctggtgctgtgttcggcggagggaccaagctgaccgtcctagcctgacacacacagccctccccagactgtgggatgaggccctgtgcccgcagtcacatgtggaatatcaagacacacacatctatgacaatcaccgtagactagtacgagtatgtactctcgtgcagtctgccctgactcagcctgcctccgtgtctgggtctcctggacagtcgatcaccatctcctgcactgggagcagctccaacattggggcgggttatgttgtacattggtaccaacagcacccaggcaaagcccccaaactcatgatttatgaaaataataagcgaccctcaggggtttctaatcgcttctctggctccaagtctggcaacacggcctccctgaccatctctgggctccaggctgaggacgaggctgattattactgcagctcatatacaagcagcggcactcctgtggtattcggcggagggaccaagctgaccgtcctagcctgacacacacagccctccccagactgtgggatgaggccctgtgcccgcagtcacatgtggaatatcaagacacacacatctatgacaatcacacgcgagtatactactatgtactgtacagtcagtctgccctgactcagcctgcctccgtgtctgggtctcctggacagtcgatcaccatctcctgcactggaaccagcagtgatgttgggagttataaccttgtctcctggtaccaacagcacccaggcaaagcccccaaactcatgatttatgagggcagtaagcggccctcaggggtttctaatcgcttctctggctccaagtctggcaacacggcctccctgaccatctctgggctccaggctgaggacgaggctgattattactgccagtcctatgacagcagcctgagtggttgccagtcctatgacagcagcctgagtggtttggtgttcggcggagggaccaagctgaccgtcctagcctgacacacacagccctccccagactgtgggatgaggccctgtgcccgcagtcacatgtggaatatcaagacacacacatctatgacaatcacatagagtactcacgctacgtcagtagacgtcagtctgccctgactcagcctgcctccgtgtctgggtctcctggacagtcgatcaccatctcctgcgggggaaacaacattggaagtaaaaatgtgcactggtaccaacagcacccaggcaaagcccccaaactcatgatttatagggatagcaaccggccctctggggtttctaatcgcttctctggctccaagtctggcaacacggcctccctgaccatctctgggctccaggctgaggacgaggctgattattactgccagtcctatgacaggagtggttgggtgttcggcggagggaccaagctgaccgtcctagcctgacacacacagccctccccagactgtgggatgaggccctgtgcccgcagtcacatgtggaatatcaagacacacacatctatgacaatcactacgctgtcttagtgtagattcgatcacgtcagtctgccctgactcagcctgcctccgtgtctgggtctcctggacagtcgatcaccatctcctgctctggagaagcattgccaaaaaaatatgcttattggtaccaacagcacccaggcaaagcccccaaactcatgatttataaagacagcgagaggccctcaggggtttctaatcgcttctctggctccaagtctggcaacacggcctccctgaccatctctgggctccaggctgaggacgaggctgattattactgcaactcttttacaagcaccaccaattatgtcttattcggcggagggaccaagctgaccgtcctagcctgacacacacagccctccccagactgtgggatgaggccctgtgcccgcagtcacatgtggaatatcaagacacacacatctatgacaatcactgacgtatgttgtgagtagtacagtatatacagtctgccctgactcagcctgcctccgtgtctgggtctcctggacagtcgatcaccatctcctgcgggggaaacaacattggaagtaaaagtgtgcactggtaccaacagcacccaggcaaagcccccaaactcatgatttattatgatagcgaccggccctcaggggtttctaatcgcttctctggctccaagtctggcaacacggcctccctgaccatctctgggctccaggctgaggacgaggctgattattactgccaggtgtgggatgataatagtgatcatcttatattcggcggagggaccaagctgaccgtcctagcctgacacacacagccctccccagactgtgggatgaggccctgtgcccgcagtcacatgtggaatatcaagacacacacatctatgacaatcacagtatacataagtcgagagaagtgctacgacagtctgccctgactcagcctgcctccgtgtctgggtctcctggacagtcgatcaccatctcctgctctggagatgcattgccaaagcaatatgcttattggtaccaacagcacccaggcaaagcccccaaactcatgatttatgatgatagcgaccggccctcaggggtttctaatcgcttctctggctccaagtctggcaacacggcctccctgaccatctctgggctccaggctgaggacgaggctgattattactgcagctcatatgcaggcagcaacaattgggtgttcggcggagggaccaagctgaccgtcctagcctgacacacacagccctccccagactgtgggatgaggccctgtgcccgcagtcacatgtggaatatcaagacacacacatctatgacaatcaccgtacagtcacgtactcagactacgctctacagtctgccctgactcagcctgcctccgtgtctgggtctcctggacagtcgatcaccatctcctgcaccctaagcagtgagcacagcacctacaccatcgaatggtaccaacagcacccaggcaaagcccccaaactcatgatttatgttaagagtgatggcagccacagcaagggggacggggtttctaatcgcttctctggctccaagtctggcaacacggcctccctgaccatctctgggctccaggctgaggacgaggctgattattactgcggagagagccacacgattgatggccaagtcggtgtggtattcggcggagggaccaagctgaccgtcctagcctgacacacacagccctccccagactgtgggatgaggccctgtgcccgcagtcacatgtggaatatcaagacacacacatctatgacaatcactatatatacatatgctagtatcacgcgagacagtctgccctgactcagcctgcctccgtgtctgggtctcctggacagtcgatcaccatctcctgcactctgagcagtgggcacagcagctacgccatcgcatggtaccaacagcacccaggcaaagcccccaaactcatgatttatcttaacagtgatggcagccacagcaagggggacggggtttctaatcgcttctctggctccaagtctggcaacacggcctccctgaccatctctgggctccaggctgaggacgaggctgattattactgcagctcatatgcaggcaacaacaatttgggggatgtgcttttcggcggagggaccaagctgaccgtcctagcctgacacacacagccctccccagactgtgggatgaggccctgtgcccgcagtcacatgtggaatatcaagacacacacatctatgacaatcactgagtcagtatgtagtgtgatgtcacacgacagtctgccctgactcagcctgcctccgtgtctgggtctcctggacagtcgatcaccatctcctgcaccttgcgcagtggcatcaatgttggtacctacaggatatactggtaccaacagcacccaggcaaagcccccaaactcatgatttattacaaatcagactcagataagcagcagggctctggggtttctaatcgcttctctggctccaagtctggcaacacggcctccctgaccatctctgggctccaggctgaggacgaggctgattattactgcgcagcatgggatgacagcctgaatgtggtattcggcggagggaccaagctgaccgtcctagcctgacacacacagccctccccagactgtgggatgaggccctgtgcccgcagtcacatgtggaatatcaagacacacacatctatgacaatcacacatgacgacacgacagctcacgtctcatccagtctgccctgactcagcctgcctccgtgtctgggtctcctggacagtcgatcaccatctcctgcacccgcagcagtggcagcattgccagcaactatgtgcagtggtaccaacagcacccaggcaaagcccccaaactcatgatttatgaggataaccaaagaccctctggggtttctaatcgcttctctggctccaagtctggcaacacggcctccctgaccatctctgggctccaggctgaggacgaggctgattattactgccagtcctatgacagcagcctgaggagagtcttcggcggagggaccaagctgaccgtcctagcctgacacacacagccctccccagactgtgggatgaggccctgtgcccgcagtcacatgtggaatatcaagacacacacatctatgacaatcacagcgactagcagtagtgatcagtgacacaccagtctgccctgactcagcctgcctccgtgtctgggtctcctggacagtcgatcaccatctcctgcggctccagcactggagctgtcaccagtggtcattatccctactggtaccaacagcacccaggcaaagcccccaaactcatgatttatgatacaagcaacaaacactccggggtttctaatcgcttctctggctccaagtctggcaacacggcctccctgaccatctctgggctccaggctgaggacgaggctgattattactgcgcaacatgggatgacagcctgaatgagggagtgttcggcggagggaccaagctgaccgtcctagcctgacacacacagccctccccagactgtgggatgaggccctgtgcccgcagtcacatgtggaatatcaagacacacacatctatgacaatcacatctactgaccacgtagatccacgtgtcgccagtctgccctgactcagcctgcctccgtgtctgggtctcctggacagtcgatcaccatctcctgcaccctgagcagcggctacagtaattataaagtggactggtaccaacagcacccaggcaaagcccccaaactcatgatttatgtgggcactggtgggattgtgggatccaagggggatggggtttctaatcgcttctctggctccaagtctggcaacacggcctccctgaccatctctgggctccaggctgaggacgaggctgattattactgcggggcagaccatggcagtgggagcaacttcgtggtggtattcggcggagggaccaagctgaccgtcctagcctgacacacacagccctccccagactgtgggatgaggccctgtgcccgcagtcacatgtggaatatcaagacacacacatctatgacaatcacgtttaaacaagcttcgaagggcccgctagcgtcgacgtttaaacagcactgtagatcagacacgatatcgcgagcagtctgccctgactcagcctgcctccgtgtctgggtctcctggacagtcgatcaccatctcctgctctggaagcagctccaacatcggaaataatgctgtaaactggtaccaacagcacccaggcaaagcccccaaactcatgatttattatgatgatctgctgccctcaggggtttctaatcgcttctctggctccaagtctggcaacacggcctccctgaccatctctgggctccaggctgaggacgaggctgattattactgcggaacatgggatggcagcctgaatggtgggaggctgttcggcggagggaccaagctgaccgtcctagcctgacacacacagccctccccagactgtgggatgaggccctgtgcccgcagtcacatgtggaatatcaagacacacacatctatgacaatcactgatacgtctcatagtagtgcgagagataccagtctgccctgactcagcctgcctccgtgtctgggtctcctggacagtcgatcaccatctcctgctctggaagcagctccaacatcggaagtaatactgtaaactggtaccaacagcacccaggcaaagcccccaaactcatgatttatagtaataatcagcggccctcaggggtttctaatcgcttctctggctccaagtctggcaacacggcctccctgaccatctctgggctccaggctgaggacgaggctgattattactgcgcagcatgggatgacagcctgagtggtgtggttttcggcggagggaccaagctgaccgtcctagcctgacacacacagccctccccagactgtgggatgaggccctgtgcccgcagtcacatgtggaatatcaagacacacacatctatgacaatcactctacgtagctgtactactcacgactacagcagtctgccctgactcagcctgcctccgtgtctgggtctcctggacagtcgatcaccatctcctgctctggaagcagctccgacatggggaattatgcggtatcctggtaccaacagcacccaggcaaagcccccaaactcatgatttatgatgtcagtaagcggccctcaggggtttctaatcgcttctctggctccaagtctggcaacacggcctccctgaccatctctgggctccaggctgaggacgaggctgattattactgcagctcatatgaagacagcaacaatttgggggtattcggcggagggaccaagctgaccgtcctagcctgacacacacagccctccccagactgtgggatgaggccctgtgcccgcagtcacatgtggaatatcaagacacacacatctatgacaatcactagagacgagtcgtcgctcgacatacgcgtcagtctgccctgactcagcctgcctccgtgtctgggtctcctggacagtcgatcaccatctcctgcactggaaccagcagtgacgttggtagttataaccgtgtctcctggtaccaacagcacccaggcaaagcccccaaactcatgatttatgaggtcagtaatcggccctcaggggtttctaatcgcttctctggctccaagtctggcaacacggcctccctgaccatctctgggctccaggctgaggacgaggctgattattactgcgcagcatgggatggcagcccggccccgagtgacttttatgtcttcggcggagggaccaagctgaccgtcctagcctgacacacacagccctccccagactgtgggatgaggccctgtgcccgcagtcacatgtggaatatcaagacacacacatctatgacaatcacagactatactagcgtcgtctagtacgctatcagtctgccctgactcagcctgcctccgtgtctgggtctcctggacagtcgatcaccatctcctgctctggagataaattgggggataaatatgcttgctggtaccaacagcacccaggcaaagcccccaaactcatgatttatcaagatagcaagcggccctcaggggtttctaatcgcttctctggctccaagtctggcaacacggcctccctgaccatctctgggctccaggctgaggacgaggctgattattactgccagtcctttgacaacagcctgtgccagtcctttgacaacagcctgaattatgtgcttttcggcggagggaccaagctgaccgtcctagcctgacacacacagccctccccagactgtgggatgaggccctgtgcccgcagtcacatgtggaatatcaagacacacacatctatgacaatcaccgacgtgacttacacacacttacagatcgtcagtctgccctgactcagcctgcctccgtgtctgggtctcctggacagtcgatcaccatctcctgctctggagatgcattgccaaaaaaatatgcttattggtaccaacagcacccaggcaaagcccccaaactcatgatttatgaggacagcaaacgaccctccggggtttctaatcgcttctctggctccaagtctggcaacacggcctccctgaccatctctgggctccaggctgaggacgaggctgattattactgcgcagcatgggatgacagcctgaatggtcccttttatgtcttcggcggagggaccaagctgaccgtcctagcctgacacacacagccctccccagactgtgggatgaggccctgtgcccgcagtcacatgtggaatatcaagacacacacatctatgacaatcactcgcactagttctagcgacttctatactatcagtctgccctgactcagcctgcctccgtgtctgggtctcctggacagtcgatcaccatctcctgccaaggagacagcctcagaagctattatgcaagctggtaccaacagcacccaggcaaagcccccaaactcatgatttatggtaaaaacaaccggccctcaggggtttctaatcgcttctctggctccaagtctggcaacacggcctccctgaccatctctgggctccaggctgaggacgaggctgattattactgccagtcctatgacagcagcctgagtggtgtggtattcggcggagggaccaagctgaccgtcctagcctgacacacacagccctccccagactgtgggatgaggccctgtgcccgcagtcacatgtggaatatcaagacacacacatctatgacaatcacacgcgatcgaactagcagtaagctcacgtacagtctgccctgactcagcctgcctccgtgtctgggtctcctggacagtcgatcaccatctcctgctctggagatgtactgggggaaaattatgctgactggtaccaacagcacccaggcaaagcccccaaactcatgatttatgaagatagtgagcggtaccctggggtttctaatcgcttctctggctccaagtctggcaacacggcctccctgaccatctctgggctccaggctgaggacgaggctgattattactgcggaacatgggatagcagcctgagtggtgtggtattcggcggagggaccaagctgaccgtcctagcctgacacacacagccctccccagactgtgggatgaggccctgtgcccgcagtcacatgtggaatatcaagacacacacatctatgacaatcaccgatcgtatacgcagtacgacgcgtatacacagtctgccctgactcagcctgcctccgtgtctgggtctcctggacagtcgatcaccatctcctgctcaggagatgtactggcaaaaaaatatgctcggtggtaccaacagcacccaggcaaagcccccaaactcatgatttataggaaaaacagccaactctcaggggtttctaatcgcttctctggctccaagtctggcaacacggcctccctgaccatctctgggctccaggctgaggacgaggctgattattactgctactctgcggctgacaacaatcttgtggtattcggcggagggaccaagctgaccgtcctagcctgacacacacagccctccccagactgtgggatgaggccctgtgcccgcagtcacatgtggaatatcaagacacacacatctatgacaatcacctatagcgtatacgtcatcatagtcgcatacagtctgccctgactcagcctgcctccgtgtctgggtctcctggacagtcgatcaccatctcctgcactctgagcagtgggcacagtagctacatcatcgcatggtaccaacagcacccaggcaaagcccccaaactcatgatttatcttgaaggtagtggaagctacaacaaggggagcggggtttctaatcgcttctctggctccaagtctggcaacacggcctccctgaccatctctgggctccaggctgaggacgaggctgattattactgcgagacctgggacagtaacactcatgtggtattcggcggagggaccaagctgaccgtcctagcctgacacacacagccctccccagactgtgggatgaggccctgtgcccgcagtcacatgtggaatatcaagacacacacatctatgacaatcactcgatagtgatcgctgcgtatctgacgtcacagtctgccctgactcagcctgcctccgtgtctgggtctcctggacagtcgatcaccatctcctgcaccttgcccagtgacatcaatgttggtagctacaacatatactggtaccaacagcacccaggcaaagcccccaaactcatgatttattactactcagactcagataagggccagggctctggggtttctaatcgcttctctggctccaagtctggcaacacggcctccctgaccatctctgggctccaggctgaggacgaggctgattattactgccactcatatgcaggcggcgacactttcgatgtggtgttcggcggagggaccaagctgaccgtcctagcctgacacacacagccctccccagactgtgggatgaggccctgtgcccgcagtcacatgtggaatatcaagacacacacatctatgacaatcactgtcgtcgcaacacatacgcacagtcgtgccagtctgccctgactcagcctgcctccgtgtctgggtctcctggacagtcgatcaccatctcctgcatgctgagcagtggcttcagtgttggggacttctggataaggtggtaccaacagcacccaggcaaagcccccaaactcatgatttattaccactcagactccaataagggccaaggctctggggtttctaatcgcttctctggctccaagtctggcaacacggcctccctgaccatctctgggctccaggctgaggacgaggctgattattactgcggtacatggcacagcaactctaagactcatgtggtattcggcggagggaccaagctgaccgtcctagcctgacacacacagccctccccagactgtgggatgaggccctgtgcccgcagtcacatgtggaatatcaagacacacacatctatgacaatcacactcatctacactcgcgcacagagcgtcaccagtctgccctgactcagcctgcctccgtgtctgggtctcctggacagtcgatcaccatctcctgcgcttccagcactggagcagtcaccagtggttactatccaaactggtaccaacagcacccaggcaaagcccccaaactcatgatttatagtacaagcaacaaacactccggggtttctaatcgcttctctggctccaagtctggcaacacggcctccctgaccatctctgggctccaggctgaggacgaggctgattattactgcagctcatatacaatcaccgacatcgtggtcttcggcggagggaccaagctgaccgtcctagcctgacacacacagccctccccagactgtgggatgaggccctgtgcccgcagtcacatgtggaatatcaagacacacacatctatgacaatcacagtgtatgtcatagatagacatatagtcgccagtctgccctgactcagcctgcctccgtgtctgggtctcctggacagtcgatcaccatctcctgcggcttgagctctggctcagtctctactagttactaccccagctggtaccaacagcacccaggcaaagcccccaaactcatgatttatagcacaaacactcgctcttctggggtttctaatcgcttctctggctccaagtctggcaacacggcctccctgaccatctctgggctccaggctgaggacgaggctgattattactgcgtgctgtatatgggtagtggcatttctgtggtattcggcggagggaccaagctgaccgtcctagcctgacacacacagccctccccagactgtgggatgaggccctgtgcccgcagtcacatgtggaatatcaagacacacacatctatgacaatcaccatactctaccgacactatccgagacgcgccagtctgccctgactcagcctgcctccgtgtctgggtctcctggacagtcgatcaccatctcctgcactgggaacagcaacaatgttggcaaccaaggagcagcttggtaccaacagcacccaggcaaagcccccaaactcatgatttataggaataacaaccggccctcaggggtttctaatcgcttctctggctccaagtctggcaacacggcctccctgaccatctctgggctccaggctgaggacgaggctgattattactgcgcagcatgggatgacagcctgagtgcccatgtggtattcggcggagggaccaagctgaccgtcctagcctgacacacacagccctccccagactgtgggatgaggccctgtgcccgcagtcacatgtggaatatcaagacacacacatctatgacaatcac

SEQ ID NO: 143 - DNA, 25655 bp, Artificial Sequence
  Synthetic DNA
tcgcgcgtttcggtgatgacggtgaaaacctctgacacatgcagctcccggagacggtcacagcttgtctgtaagcggatgccgggagcagacaagcccgtcagggcgcgtcagcgggtgttggcgggtgtcggggctggcttaactatgcggcatcagagcagattgtactgagagtgcaccatatgcggtgtgaaataccgcacagatgcgtaaggagaaaataccgcatcaggcgccattcgccattcaggctgcgcaactgttgggaagggcgatcggtgcgggcctcttcgctattacgccagctggcgaaagggggatgtgctgcaaggcgattaagttgggtaacgccagggttttcccagtcacgacgttgtaaaacgacggccagtgcggccgcgggtatcacgtggggcaaatcgagagctaccattggctatggggaggagaaaatgaggcgtgctacttcctcgttcctgcagtgcgtgtcgaggtgccgtgttggtcggatctcagtggcagagcaggatggtgagcggtggccttggggccgctccctcactctgctgggctggtgcggtggctccgggaccggactttcagtggtgtttggtgtggtgctcactgtcctttggtgtcactgtgtggtgaattccctcagctgggcggtgagagcccatgctgtgtcctggtaggagtagtctgggctgcagtgcgggctctttgtgcgtgttgggggcggttccctggaagctaattctggaagaaatcccggctgcctctgtaacagttgttggcgatgtcaaacaccctggagctgctgactggctctgtaccattgagtgatgcagtttaaacctctctctttcctcctgctgtgtgtgaagctggtgttagtgctaggagacctgcacatccctcaccgatgcagtggtttaccagcaaagttcaagagcctcctggttccagggaagattcagcatattttgtgtacaggaaacctctgcaccaaggagagctatgactacctcaggactttggctggagatgttcacgttgttaagggggactctgaggtaatgttcttgctgctgtgaattcctcagtcctccatcttacaagccgtagttgtcccactgaaagctgggaaacccttcggtgtttgcaattcctgagcgctaatgtgtgggggaaggatgtaggaacaaataaggctcaagagacaacaacttcctaggctcctcttattgcccttgtggtaagggaggacttggtgtgtagtggtaatacatgcactcaacttattaagttctcatagctgctgtgaagctgctgcagtccctcagatccctgcaggaagaggggactgactgactgttgaatagccttgaagctcctgctctgcatgtggttccggtcaggctcaagatcccagttcttagctcttcagttgctcttctgggggtatagtactagcatctgggtcactgcagatggacagagactgtgcttgggtagcaaaaggcagacttacgttgtgaaaccttcattgtgttggtgaggttctttgatttctaccttgtgtatctctcttcctcagagtctgaattatcctgaacagaaggttgtaactgttgggcagttcagaattgggttgattcatggccatcaagtcattccctggggtgatgtggcaagcttggcattgctgcagaggcagctggatgtagacattcttatctcaggacatacacacagatttgaagcatttgagcatgaaaataagttctacatcaacccaggatcagctacaggagcctacactggtttacaaacgtgagtacaatgagccttgtgtttgtctttaagacagatgtctgtccttaagagtgcagcccatgtgttgaagagcactggtgagatgcagtgccatgcaggccatctctccctttcccagagaacacggcctacctctctctgttcataaggtcttggttaacttatgagttggccagcacagcctggcactgatgtgtcatgatcataaccctgagcccacgctctgctatgctgttgcttcttagagttgcattgccttgaggtgtattccagaagctgtgtgctgagctcttgttgggaaagaggccctcagggcactgccaacatctgaggcttgcaggagctggaacattcagccctgagggctgctctggccaactgcagctctgagtctgcagtcagtgcctctgagctgtgatgcttctcagataactgcagccctttgcaatgtaatgttttataatatatttccataggacatcttggtaagaggtgtaagctaatcagggtgattgacaaagtatgttttctttccaggaacgtcattccttcatttgtactgatggatatccaggcttccacagttgtgacttatgtataccagctaattgaggacgatgtgaaagtagaaagaattgagttcaagaaatactgacacgtgtttgaatctgcctgctgacttctcactgcctctcattctttctctcctagttaaagctgaatccggccacgtgggggtgctgctgcagcggcgtgtaactgtgagcttgggaagttctcaactagggcttagagcaggagaaactgattaacagaaattgccttattaaatgtatatatttcctgtgtctaagaacgaggtgctgttgttcctgacttgcggagctgcagctagtggtagcttggaatttaacctctcctgtaaaatgagcatagaataaaacagtattttcacatttctggatcctgttaattgtttgttaattaagaggacaggaattcagtgtcagggggctgctctttgcttcccaatgtgtaccactgaagcctctctggatttatcagagatactcaatggactcttaacagcactgtggcacctgacctcctgctgccttcagcctcccttcctggctggtgtgcttatgttgaggagctgtgggaggctggtgcagttctgtgggatgaggtaaggccagctgaatagcctgggggctggtcagggggcttagtgagaggagcagggctggggaatgttgtgaacagcaggtggtgccactgctattctgaggaaggaggcagcttctgcaaatgctttgcaatgcaggatgacaaagtgcttctgctagccctaggctaccgttcgtataatgtatactatacgaagttattttatttgtgaaatttgtgatgctattgctttatttgtaaccattataagctgcaataaacaagttggggtgggcgaagaactccagcatgagatccccgcgctggaggatcatccagccggcgtcccggaaaacgattccgaagcccaacctttcatagaaggcggcggtggaatcgaaatctcgtgatggcaggttgggcgtcgcttggtcggtcatttcgaaccccagagtcccgctcagaagaactcgtcaagaaggcgatagaaggcgatgcgctgcgaatcgggagcggcgataccgtaaagcacgaggaagcggtcagcccattcgccgccaagctcttcagcaatatcacgggtagccaacgctatgtcctgatagcggtccgccacacccagccggccacagtcgatgaatccagaaaagcggccattttccaccatgatattcggcaagcaggcatcgccatgggtcacgacgagatcctcgccgtcgggcatgcgcgccttgagcctggcgaacagttcggctggcgcgagcccctgatgctcttcgtccagatcatcctgatcgacaagaccggcttccatccgagtacgtgctcgctcgatgcgatgtttcgcttggtggtcgaatgggcaggtagccggatcaagcgtatgcagccgccgcattgcatcagccatgatggatactttctcggcaggagcaaggtgagatgacaggagatcctgccccggcacttcgcccaatagcagccagtcccttcccgcttcagtgacaacgtcgagcacagctgcgcaaggaacgcccgtcgtggccagccacgatagccgcgctgcctcgtcctgcagttcattcagggcaccggacaggtcggtcttgacaaaaagaaccgggcgcccctgcgctgacagccggaacacggcggcatcagagcagccgattgtctgttgtgcccagtcatagccgaatagcctctccacccaagcggccggagaacctgcgtgcaatccatcttgttcaatcatgcgaaacgatcctcatcctgtctcttgatcagatccgaaaatggatatacaagctcccgggagctttttgcaaaagcctaggcctccaaaaaagcctcctcactacttctggaatagctcagaggcagaggcggcctcggcctctgcataaataaaaaaaattagtcagccatggggcggagaatgggcggaactgggcggagttaggggcgggatgggcggagttaggggcgggactatggttgctgactaattgagatgcatgctttgcatacttctgcctgctggggagcctggggactttccacacctggttgctgactaattgagatgcatgctttgcatacttctgcctgctggggagcctggggactttccacaccctaaataacttcgtataatgtatactatacgaacggtagcgttaaccggtcgacatgcaagcttgctagcgtttaaacacgagtgcgtacgctcgacaagacgcactccagtctgccctgactcagcctgcctccgtgtctgggtctcctggacagtcgatcaccatctcctgctctggaagcagctccaacatcggaagtaattatgtatactggtaccaacagcacccaggcaaagcccccaaactcatgatttataggaataatcagcggccctcaggggtttctaatcgcttctctggctccaagtctggcaacacggcctccctgaccatctctgggctccaggctgaggacgaggctgattattactgcgcagcatgggatgacagcctgagtggtcattgggtgttcggcggagggaccaagctgaccgtcctagcctgacacacacagccctccccagactgtgggatgaggccctgtgcccgcagtcacatgtggaatatcaagacacacacatctatgacaatcaccgtgtctctactcgcgtgtctctctatgcgcagtctgccctgactcagcctgcctccgtgtctgggtctcctggacagtcgatcaccatctcctgcactgggagcagctccaacatcggggcaggttatgatgtacactggtaccaacagcacccaggcaaagcccccaaactcatgatttatggtaacagcaatcggccctcaggggtttctaatcgcttctctggctccaagtctggcaacacggcctccctgaccatctctgggctccaggctgaggacgaggctgattattactgccagtcctatgacagcagcctgagtggttctgtggtattcggcggagggaccaagctgaccgtcctagcctgacacacacagccctccccagactgtgggatgaggccctgtgcccgcagtcacatgtggaatatcaagacacacacatctatgacaatcacatacgacgtatcacgtactacgtctagtaccagtctgccctgactcagcctgcctccgtgtctgggtctcctggacagtcgatcaccatctcctgctctggaagcagctccaacattgggaataattatgtatcctggtaccaacagcacccaggcaaagcccccaaactcatgatttatgacaataataagcgaccctcaggggtttctaatcgcttctctggctccaagtctggcaacacggcctccctgaccatctctgggctccaggctgaggacgaggctgattattactgcggaacatgggatagcagcctgagtgctggtgctgtgttcggcggagggaccaagctgaccgtcctagcctgacacacacagccctccccagactgtgggatgaggccctgtgcccgcagtcacatgtggaatatcaagacacacacatctatgacaatcaccgtagactagtacgagtatgtactctcgtgcagtctgccctgactcagcctgcctccgtgtctgggtctcctggacagtcgatcaccatctcctgcactgggagcagctccaacattggggcgggttatgttgtacattggtaccaacagcacccaggcaaagcccccaaactcatgatttatgaaaataataagcgaccctcaggggtttctaatcgcttctctggctccaagtctggcaacacggcctccctgaccatctctgggctccaggctgaggacgaggctgattattactgcagctcatatacaagcagcggcactcctgtggtattcggcggagggaccaagctgaccgtcctagcctgacacacacagccctccccagactgtgggatgaggccctgtgcccgcagtcacatgtggaatatcaagacacacacatctatgacaatcacacgcgagtatactactatgtactgtacagtcagtctgccctgactcagcctgcctccgtgtctgggtctcctggacagtcgatcaccatctcctgcactggaaccagcagtgatgttgggagttataaccttgtctcctggtaccaacagcacccaggcaaagcccccaaactcatgatttatgagggcagtaagcggccctcaggggtttctaatcgcttctctggctccaagtctggcaacacggcctccctgaccatctctgggctccaggctgaggacgaggctgattattactgccagtcctatgacagcagcctgagtggttgccagtcctatgacagcagcctgagtggtttggtgttcggcggagggaccaagctgaccgtcctagcctgacacacacagccctccccagactgtgggatgaggccctgtgcccgcagtcacatgtggaatatcaagacacacacatctatgacaatcacatagagtactcacgctacgtcagtagacgtcagtctgccctgactcagcctgcctccgtgtctgggtctcctggacagtcgatcaccatctcctgcgggggaaacaacattggaagtaaaaatgtgcactggtaccaacagcacccaggcaaagcccccaaactcatgatttatagggatagcaaccggccctctggggtttctaatcgcttctctggctccaagtctggcaacacggcctccctgaccatctctgggctccaggctgaggacgaggctgattattactgccagtcctatgacaggagtggttgggtgttcggcggagggaccaagctgaccgtcctagcctgacacacacagccctccccagactgtgggatgaggccctgtgcccgcagtcacatgtggaatatcaagacacacacatctatgacaatcactacgctgtcttagtgtagattcgatcacgtcagtctgccctgactcagcctgcctccgtgtctgggtctcctggacagtcgatcaccatctcctgctctggagaagcattgccaaaaaaatatgcttattggtaccaacagcacccaggcaaagcccccaaactcatgatttataaagacagcgagaggccctcaggggtttctaatcgcttctctggctccaagtctggcaacacggcctccctgaccatctctgggctccaggctgaggacgaggctgattattactgcaactcttttacaagcaccaccaattatgtcttattcggcggagggaccaagctgaccgtcctagcctgacacacacagccctccccagactgtgggatgaggccctgtgcccgcagtcacatgtggaatatcaagacacacacatctatgacaatcactgacgtatgttgtgagtagtacagtatatacagtctgccctgactcagcctgcctccgtgtctgggtctcctggacagtcgatcaccatctcctgcgggggaaacaacattggaagtaaaagtgtgcactggtaccaacagcacccaggcaaagcccccaaactcatgatttattatgatagcgaccggccctcaggggtttctaatcgcttctctggctccaagtctggcaacacggcctccctgaccatctctgggctccaggctgaggacgaggctgattattactgccaggtgtgggatgataatagtgatcatcttatattcggcggagggaccaagctgaccgtcctagcctgacacacacagccctccccagactgtgggatgaggccctgtgcccgcagtcacatgtggaatatcaagacacacacatctatgacaatcacagtatacataagtcgagagaagtgctacgacagtctgccctgactcagcctgcctccgtgtctgggtctcctggacagtcgatcaccatctcctgctctggagatgcattgccaaagcaatatgcttattggtaccaacagcacccaggcaaagcccccaaactcatgatttatgatgatagcgaccggccctcaggggtttctaatcgcttctctggctccaagtctggcaacacggcctccctgaccatctctgggctccaggctgaggacgaggctgattattactgcagctcatatgcaggcagcaacaattgggtgttcggcggagggaccaagctgaccgtcctagcctgacacacacagccctccccagactgtgggatgaggccctgtgcccgcagtcacatgtggaatatcaagacacacacatctatgacaatcaccgtacagtcacgtactcagactacgctctacagtctgccctgactcagcctgcctccgtgtctgggtctcctggacagtcgatcaccatctcctgcaccctaagcagtgagcacagcacctacaccatcgaatggtaccaacagcacccaggcaaagcccccaaactcatgatttatgttaagagtgatggcagccacagcaagggggacggggtttctaatcgcttctctggctccaagtctggcaacacggcctccctgaccatctctgggctccaggctgaggacgaggctgattattactgcggagagagccacacgattgatggccaagtcggtgtggtattcggcggagggaccaagctgaccgtcctagcctgacacacacagccctccccagactgtgggatgaggccctgtgcccgcagtcacatgtggaatatcaagacacacacatctatgacaatcactatatatacatatgctagtatcacgcgagacagtctgccctgactcagcctgcctccgtgtctgggtctcctggacagtcgatcaccatctcctgcactctgagcagtgggcacagcagctacgccatcgcatggtaccaacagcacccaggcaaagcccccaaactcatgatttatcttaacagtgatggcagccacagcaagggggacggggtttctaatcgcttctctggctccaagtctggcaacacggcctccctgaccatctctgggctccaggctgaggacgaggctgattattactgcagctcatatgcaggcaacaacaatttgggggatgtgcttttcggcggagggaccaagctgaccgtcctagcctgacacacacagccctccccagactgtgggatgaggccctgtgcccgcagtcacatgtggaatatcaagacacacacatctatgacaatcactgagtcagtatgtagtgtgatgtcacacgacagtctgccctgactcagcctgcctccgtgtctgggtctcctggacagtcgatcaccatctcctgcaccttgcgcagtggcatcaatgttggtacctacaggatatactggtaccaacagcacccaggcaaagcccccaaactcatgatttattacaaatcagactcagataagcagcagggctctggggtttctaatcgcttctctggctccaagtctggcaacacggcctccctgaccatctctgggctccaggctgaggacgaggctgattattactgcgcagcatgggatgacagcctgaatgtggtattcggcggagggaccaagctgaccgtcctagcctgacacacacagccctccccagactgtgggatgaggccctgtgcccgcagtcacatgtggaatatcaagacacacacatctatgacaatcacacatgacgacacgacagctcacgtctcatccagtctgccctgactcagcctgcctccgtgtctgggtctcctggacagtcgatcaccatctcctgcacccgcagcagtggcagcattgccagcaactatgtgcagtggtaccaacagcacccaggcaaagcccccaaactcatgatttatgaggataaccaaagaccctctggggtttctaatcgcttctctggctccaagtctggcaacacggcctccctgaccatctctgggctccaggctgaggacgaggctgattattactgccagtcctatgacagcagcctgaggagagtcttcggcggagggaccaagctgaccgtcctagcctgacacacacagccctccccagactgtgggatgaggccctgtgcccgcagtcacatgtggaatatcaagacacacacatctatgacaatcacagcgactagcagtagtgatcagtgacacaccagtctgccctgactcagcctgcctccgtgtctgggtctcctggacagtcgatcaccatctcctgcggctccagcactggagctgtcaccagtggtcattatccctactggtaccaacagcacccaggcaaagcccccaaactcatgatttatgatacaagcaacaaacactccggggtttctaatcgcttctctggctccaagtctggcaacacggcctccctgaccatctctgggctccaggctgaggacgaggctgattattactgcgcaacatgggatgacagcctgaatgagggagtgttcggcggagggaccaagctgaccgtcctagcctgacacacacagccctccccagactgtgggatgaggccctgtgcccgcagtcacatgtggaatatcaagacacacacatctatgacaatcacatctactgaccacgtagatccacgtgtcgccagtctgccctgactcagcctgcctccgtgtctgggtctcctggacagtcgatcaccatctcctgcaccctgagcagcggctacagtaattataaagtggactggtaccaacagcacccaggcaaagcccccaaactcatgatttatgtgggcactggtgggattgtgggatccaagggggatggggtttctaatcgcttctctggctccaagtctggcaacacggcctccctgaccatctctgggctccaggctgaggacgaggctgattattactgcggggcagaccatggcagtgggagcaacttcgtggtggtattcggcggagggaccaagctgaccgtcctagcctgacacacacagccctccccagactgtgggatgaggccctgtgcccgcagtcacatgtggaatatcaagacacacacatctatgacaatcacgtttaaacaagcttcgaagggcccgctagcgtcgacgtttaaacagcactgtagatcagacacgatatcgcgagcagtctgccctgactcagcctgcctccgtgtctgggtctcctggacagtcgatcaccatctcctgctctggaagcagctccaacatcggaaataatgctgtaaactggtaccaacagcacccaggcaaagcccccaaactcatgatttattatgatgatctgctgccctcaggggtttctaatcgcttctctggctccaagtctggcaacacggcctccctgaccatctctgggctccaggctgaggacgaggctgattattactgcggaacatgggatggcagcctgaatggtgggaggctgttcggcggagggaccaagctgaccgtcctagcctgacacacacagccctccccagactgtgggatgaggccctgtgcccgcagtcacatgtggaatatcaagacacacacatctatgacaatcactgatacgtctcatagtagtgcgagagataccagtctgccctgactcagcctgcctccgtgtctgggtctcctggacagtcgatcaccatctcctgctctggaagcagctccaacatcggaagtaatactgtaaactggtaccaacagcacccaggcaaagcccccaaactcatgatttatagtaataatcagcggccctcaggggtttctaatcgcttctctggctccaagtctggcaacacggcctccctgaccatctctgggctccaggctgaggacgaggctgattattactgcgcagcatgggatgacagcctgagtggtgtggttttcggcggagggaccaagctgaccgtcctagcctgacacacacagccctccccagactgtgggatgaggccctgtgcccgcagtcacatgtggaatatcaagacacacacatctatgacaatcactctacgtagctgtactactcacgactacagcagtctgccctgactcagcctgcctccgtgtctgggtctcctggacagtcgatcaccatctcctgctctggaagcagctccgacatggggaattatgcggtatcctggtaccaacagcacccaggcaaagcccccaaactcatgatttatgatgtcagtaagcggccctcaggggtttctaatcgcttctctggctccaagtctggcaacacggcctccctgaccatctctgggctccaggctgaggacgaggctgattattactgcagctcatatgaagacagcaacaatttgggggtattcggcggagggaccaagctgaccgtcctagcctgacacacacagccctccccagactgtgggatgaggccctgtgcccgcagtcacatgtggaatatcaagacacacacatctatgacaatcactagagacgagtcgtcgctcgacatacgcgtcagtctgccctgactcagcctgcctccgtgtctgggtctcctggacagtcgatcaccatctcctgcactggaaccagcagtgacgttggtagttataaccgtgtctcctggtaccaacagcacccaggcaaagcccccaaactcatgatttatgaggtcagtaatcggccctcaggggtttctaatcgcttctctggctccaagtctggcaacacggcctccctgaccatctctgggctccaggctgaggacgaggctgattattactgcgcagcatgggatggcagcccggccccgagtgacttttatgtcttcggcggagggaccaagctgaccgtcctagcctgacacacacagccctccccagactgtgggatgaggccctgtgcccgcagtcacatgtggaatatcaagacacacacatctatgacaatcacagactatactagcgtcgtctagtacgctatcagtctgccctgactcagcctgcctccgtgtctgggtctcctggacagtcgatcaccatctcctgctctggagataaattgggggataaatatgcttgctggtaccaacagcacccaggcaaagcccccaaactcatgatttatcaagatagcaagcggccctcaggggtttctaatcgcttctctggctccaagtctggcaacacggcctccctgaccatctctgggctccaggctgaggacgaggctgattattactgccagtcctttgacaacagcctgtgccagtcctttgacaacagcctgaattatgtgcttttcggcggagggaccaagctgaccgtcctagcctgacacacacagccctccccagactgtgggatgaggccctgtgcccgcagtcacatgtggaatatcaagacacacacatctatgacaatcaccgacgtgacttacacacacttacagatcgtcagtctgccctgactcagcctgcctccgtgtctgggtctcctggacagtcgatcaccatctcctgctctggagatgcattgccaaaaaaatatgcttattggtaccaacagcacccaggcaaagcccccaaactcatgatttatgaggacagcaaacgaccctccggggtttctaatcgcttctctggctccaagtctggcaacacggcctccctgaccatctctgggctccaggctgaggacgaggctgattattactgcgcagcatgggatgacagcctgaatggtcccttttatgtcttcggcggagggaccaagctgaccgtcctagcctgacacacacagccctccccagactgtgggatgaggccctgtgcccgcagtcacatgtggaatatcaagacacacacatctatgacaatcactcgcactagttctagcgacttctatactatcagtctgccctgactcagcctgcctccgtgtctgggtctcctggacagtcgatcaccatctcctgccaaggagacagcctcagaagctattatgcaagctggtaccaacagcacccaggcaaagcccccaaactcatgatttatggtaaaaacaaccggccctcaggggtttctaatcgcttctctggctccaagtctggcaacacggcctccctgaccatctctgggctccaggctgaggacgaggctgattattactgccagtcctatgacagcagcctgagtggtgtggtattcggcggagggaccaagctgaccgtcctagcctgacacacacagccctccccagactgtgggatgaggccctgtgcccgcagtcacatgtggaatatcaagacacacacatctatgacaatcacacgcgatcgaactagcagtaagctcacgtacagtctgccctgactcagcctgcctccgtgtctgggtctcctggacagtcgatcaccatctcctgctctggagatgtactgggggaaaattatgctgactggtaccaacagcacccaggcaaagcccccaaactcatgatttatgaagatagtgagcggtaccctggggtttctaatcgcttctctggctccaagtctggcaacacggcctccctgaccatctctgggctccaggctgaggacgaggctgattattactgcggaacatgggatagcagcctgagtggtgtggtattcggcggagggaccaagctgaccgtcctagcctgacacacacagccctccccagactgtgggatgaggccctgtgcccgcagtcacatgtggaatatcaagacacacacatctatgacaatcaccgatcgtatacgcagtacgacgcgtatacacagtctgccctgactcagcctgcctccgtgtctgggtctcctggacagtcgatcaccatctcctgctcaggagatgtactggcaaaaaaatatgctcggtggtaccaacagcacccaggcaaagcccccaaactcatgatttataggaaaaacagccaactctcaggggtttctaatcgcttctctggctccaagtctggcaacacggcctccctgaccatctctgggctccaggctgaggacgaggctgattattactgctactctgcggctgacaacaatcttgtggtattcggcggagggaccaagctgaccgtcctagcctgacacacacagccctccccagactgtgggatgaggccctgtgcccgcagtcacatgtggaatatcaagacacacacatctatgacaatcacctatagcgtatacgtcatcatagtcgcatacagtctgccctgactcagcctgcctccgtgtctgggtctcctggacagtcgatcaccatctcctgcactctgagcagtgggcacagtagctacatcatcgcatggtaccaacagcacccaggcaaagcccccaaactcatgatttatcttgaaggtagtggaagctacaacaaggggagcggggtttctaatcgcttctctggctccaagtctggcaacacggcctccctgaccatctctgggctccaggctgaggacgaggctgattattactgcgagacctgggacagtaacactcatgtggtattcggcggagggaccaagctgaccgtcctagcctgacacacacagccctccccagactgtgggatgaggccctgtgcccgcagtcacatgtggaatatcaagacacacacatctatgacaatcactcgatagtgatcgctgcgtatctgacgtcacagtctgccctgactcagcctgcctccgtgtctgggtctcctggacagtcgatcaccatctcctgcaccttgcccagtgacatcaatgttggtagctacaacatatactggtaccaacagcacccaggcaaagcccccaaactcatgatttattactactcagactcagataagggccagggctctggggtttctaatcgcttctctggctccaagtctggcaacacggcctccctgaccatctctgggctccaggctgaggacgaggctgattattactgccactcatatgcaggcggcgacactttcgatgtggtgttcggcggagggaccaagctgaccgtcctagcctgacacacacagccctccccagactgtgggatgaggccctgtgcccgcagtcacatgtggaatatcaagacacacacatctatgacaatcactgtcgtcgcaacacatacgcacagtcgtgccagtctgccctgactcagcctgcctccgtgtctgggtctcctggacagtcgatcaccatctcctgcatgctgagcagtggcttcagtgttggggacttctggataaggtggtaccaacagcacccaggcaaagcccccaaactcatgatttattaccactcagactccaataagggccaaggctctggggtttctaatcgcttctctggctccaagtctggcaacacggcctccctgaccatctctgggctccaggctgaggacgaggctgattattactgcggtacatggcacagcaactctaagactcatgtggtattcggcggagggaccaagctgaccgtcctagcctgacacacacagccctccccagactgtgggatgaggccctgtgcccgcagtcacatgtggaatatcaagacacacacatctatgacaatcacactcatctacactcgcgcacagagcgtcaccagtctgccctgactcagcctgcctccgtgtctgggtctcctggacagtcgatcaccatctcctgcgcttccagcactggagcagtcaccagtggttactatccaaactggtaccaacagcacccaggcaaagcccccaaactcatgatttatagtacaagcaacaaacactccggggtttctaatcgcttctctggctccaagtctggcaacacggcctccctgaccatctctgggctccaggctgaggacgaggctgattattactgcagctcatatacaatcaccgacatcgtggtcttcggcggagggaccaagctgaccgtcctagcctgacacacacagccctccccagactgtgggatgaggccctgtgcccgcagtcacatgtggaatatcaagacacacacatctatgacaatcacagtgtatgtcatagatagacatatagtcgccagtctgccctgactcagcctgcctccgtgtctgggtctcctggacagtcgatcaccatctcctgcggcttgagctctggctcagtctctactagttactaccccagctggtaccaacagcacccaggcaaagcccccaaactcatgatttatagcacaaacactcgctcttctggggtttctaatcgcttctctggctccaagtctggcaacacggcctccctgaccatctctgggctccaggctgaggacgaggctgattattactgcgtgctgtatatgggtagtggcatttctgtggtattcggcggagggaccaagctgaccgtcctagcctgacacacacagccctccccagactgtgggatgaggccctgtgcccgcagtcacatgtggaatatcaagacacacacatctatgacaatcaccatactctaccgacactatccgagacgcgccagtctgccctgactcagcctgcctccgtgtctgggtctcctggacagtcgatcaccatctcctgcactgggaacagcaacaatgttggcaaccaaggagcagcttggtaccaacagcacccaggcaaagcccccaaactcatgatttataggaataacaaccggccctcaggggtttctaatcgcttctctggctccaagtctggcaacacggcctccctgaccatctctgggctccaggctgaggacgaggctgattattactgcgcagcatgggatgacagcctgagtgcccatgtggtattcggcggagggaccaagctgaccgtcctagcctgacacacacagccctccccagactgtgggatgaggccctgtgcccgcagtcacatgtggaatatcaagacacacacatctatgacaatcacgtttaaacaagcttcgaagaattccgcggatgcggcgcgcctctagaatgcatcgatttaaatcgagtgaaggtcaccaaggatggagacttcagagctatctgggacacgtgttttaacgtttgatcagccttgcagcaaaacagtgttttgctctattgaacagtgttcaacaaaaacgatcagtggtctggaacacatctcctacgaagaaaggttgcgagagctgggtctggagaagaggaggctctggggcaacctccctgtggcctgtcagtgcttaaaggaggctcaagagaaagatggagagagactttatacacggagctgtagcaatatgacaaggagaaatggtttaaaatggaaagagggtagatttaggttagctatcaagaagaaattcttcactcagaggtgatgaagcactgtagcaggttgcccagagaagtattggatgcttccttcctggcagggcccaaggccagactggatgggttctgggcagcctgttctggtgggagatgtccctgcccgtggcacggcttggaaatgggtagcctttgaggtccctctcagcccaaatcattctatgttcttgtggttccctgcatttcagcctttgcctgttgactctggtgccactgttggacaattctactcagctgtgtttcatccctgccccaaagcagtaatcccatggataagcaatgctctgaggccttcaccaccatcagggctcctgctgaccctagcggcctcccttgcagcatgagccctttgttgtccgcactgctgctgctgagggtcctgccagccccccagggccttttctgcccaggcactgccacctgctaaaacccagcctgcccatggcagggcatcgcatgtctgagggatggaacggggcaagggcagtgctgcaggcagtggttcaagaaacgtttagatgttgtactgagggatgtggtttagtgggaaatactggtgataggtggatggttggactggaggatcttagaggtcttttccaaccttggtgattatgtgattctatgaagggagccatagcctgctcccatcatgccccgccagtccggctctcccgagcactttggttccgcagcatccaggcccgctctggggccggtgtgggcctgggtgctgccacgtgtccccgctgcaaggcctggccaaccccgctgtgccacaatgcaggggctgggctaggagtgggcagggaggtgtggggagaggtgtaggacgtggctgggagcgcagggagttatttgcataggggggcgtgctgcggaaggacgcgggtataaaagggcatcgaggtccccggcacagccccatcggcgtggggacacacagctgctgggattccgccatggcctgggctcctctcctcctggcggtgctcgcccacacctcaggtactcgttgcgcccggtcggggactgtgggcacggggctctgtcccactgctgcgcgggcagggctgtgcgtgcggggccgtcactgattgccgttttctcccctctctcctctccggcgcgcctctccaggttccctggtgcaggcacagtctgccctgactcagcctgcctccgtgtctgggtctcctggacagtcgatcaccatctcctgcactggaaccagcagtgacgttggtggttataactatgtctcctggtaccaacaaaacccaggcaaagcccccaaactcatgatttatgatgtcagtaatcggccctcagggatttctaatcgcttctctggctccaagtctggcaacacggcctccctgaccatctctgggctccaggctgacgacgaggctgattattactgcacctcatatacaaacgacagcaattctcaggtattcggcggagggaccaagctgaccgtcctaggtgagtcgctcatatgctaccgttcgtatagcatacattatacgaagttatcagacatgataagatacattgatgagtttggacaaaccacaactagaatgcagtgaaaaaaatgctttatttgtgaaatttgtgatgctattgctttatttgtaaccattataagctgcaataaacaagttggggtgggcgaagaactccagcatgagatccccgcgctggaggatcatccagccggcgtcccggaaaacgattccgaagcccaacctttcatagaaggcggcggtggaatcgaaatctcgtagcacgtgtcagtcctgctcctcggccacgaagtgcttagccctcccacacataaccagagggcagcaattcacgaatcccaactgccgtcggctgtccatcactgtccttcactatggctttgatcccaggatgcagatcgagaagcacctgtcggcaccgtccgcaggggctcaagatgcccctgttctcatttccgatcgcgacgatacaagtcaggttgccagctgccgcagcagcagcagtgcccagcaccacgagttctgcacaaggtcccccagtaaaatgatatacattgacaccagtgaagatgcggccgtcgctagagagagctgcgctggcgacgctgtagtcttcagagatggggatgctgttgattgtagccgttgctctttcaatgagggtggattcttcttgagacaaaggcttggccatggtttagttcctcaccttgtcgtattatactatgccgatatactatgccgatgattaattgtcaacacgtgctgatcagatccgaaaatggatatacaagctcccgggagctttttgcaaaagcctaggcctccaaaaaagcctcctcactacttctggaatagctcagaggcagaggcggcctcggcctctgcataaataaaaaaaattagtcagccatggggcggagaatgggcggaactgggcggagttaggggcgggatgggcggagttaggggcgggactatggttgctgactaattgagatgcatgctttgcatacttctgcctgctggggagcctggggactttccacacctggttgctgactaattgagatgcatgctttgcatacttctgcctgctggggagcctggggactttccacaccctaactgacacacattccacagataacttcgtatagcatacattatacgaacggtagctctagagacctcgtctcggtctttcttcccccatcgtgaaattgtgacattttgtcgatttttggtgatttgggggtttttcttggacttggcggcaggctggggtctgccaccggcgcagggccgggcactcagcgcgacagcctgggctgagtcttgtccccaccgagccggagggctccggtgtgcgccatggaggacttagggttattttgtcaatggaaagttcttaaaatttgaccagaaaatgtgcccgaggtctgtctctgccacacgatttcagaaattgtgtctaggtcgatgagaagacagtttttgtctttgtcaggaaattagttgtgagttgttagtccttccctcttagtcctaaggactaagacctttgtccccggtctggtctctcactggggactcttggctccagtgccatggggagcccaagtgtcactgacacggtgtccttgggggtgaaattcagtttttcagctgtccaggtaagtgctgtcaaaaaatggaggttattctgctgaaaaagctgagaggaatattttgtcatttttttcggaaatatatatatatatatatatataaatatataaattatttatatattttatatatatatatatataaaatatatgtatttctctctttctttttatatatatatataaatatatatatatttctccctctttctttatatatatttatagggagagaatctatatttttggccaatttggccaatttctctctctctctctttatatatatatatatatgtatatgtaatttatatatatatatataaatttatatttatttatttatttatttatatagattatttttatatacatatatatatataaatttggccaatttagaagaaattggccaaaaaaacccaatctgaaccaaattacttagggcataagtccaaaaaaaaagtgcagttcaagaattcctcgctggaaagtttttaatgggggcagttcttccccattttctggtgtagatatgagtgaagatatagatatgtatgtagatatagatttggctatagtttgtttgatgaacagtctgaggaagagtaaatcttgccttcctcatggcaatttttaattctacttcttctgagacaagtctgaacatgccttgaggtagaaagagcccgaaaattgagtgctttttctttgaaattttaattaaaattaaaaaatagccttacagcaggaaagaaagggggtgatggcagctaatcggagttccaaagctgaaccacgttcacccaaacacgtggttgaaattttgtgtgtgtatatatataaatatatatatgtatacaaaagaaaatgcctatatataaaaaaattgttatgtatattatatagatttattatagatatgtacataagatataacacgtatacatatatatgtagtctgctgtatgctttgtataaatttttatagatatgatgtatattatatgcatgggttatatatctataatatattttatctgtagaaggaactacagtataaaatgcatatatgcgtatatatacacatatttatatatatgtgtatatatatgtatacgcacacgtataacatccatgaaaatagatatggatgggtggatgtgtttgttttacagaggtgcatgtgtgtctgtacatacacagccatacatacgcgtgtgcggccgcaggcgtaatcatggtcatagctgtttcctgtgtgaaattgttatccgctcacaattccacacaacatacgagccggaagcataaagtgtaaagcctggggtgcctaatgagtgagctaactcacattaattgcgttgcgctcactgcccgctttccagtcgggaaacctgtcgtgccagctgcattaatgaatcggccaacgcgcggggagaggcggtttgcgtattgggcgctcttccgcttcctcgctcactgactcgctgcgctcggtcgttcggctgcggcgagcggtatcagctcactcaaaggcggtaatacggttatccacagaatcaggggataacgcaggaaagaacatgtgagcaaaaggccagcaaaaggccaggaaccgtaaaaaggccgcgttgctggcgtttttccataggctccgcccccctgacgagcatcacaaaaatcgacgctcaagtcagaggtggcgaaacccgacaggactataaagataccaggcgtttccccctggaagctccctcgtgcgctctcctgttccgaccctgccgcttaccggatacctgtccgcctttctcccttcgggaagcgtggcgctttctcatagctcacgctgtaggtatctcagttcggtgtaggtcgttcgctccaagctgggctgtgtgcacgaaccccccgttcagcccgaccgctgcgccttatccggtaactatcgtcttgagtccaacccggtaagacacgacttatcgccactggcagcagccactggtaacaggattagcagagcgaggtatgtaggcggtgctacagagttcttgaagtggtggcctaactacggctacactagaagaacagtatttggtatctgcgctctgctgaagccagttaccttcggaaaaagagttggtagctcttgatccggcaaacaaaccaccgctggtagcggtggtttttttgtttgcaagcagcagattacgcgcagaaaaaaaggatctcaagaagatcctttgatcttttctacggggtctgacgctcagtggaacgaaaactcacgttaagggattttggtcatgagattatcaaaaaggatcttcacctagatccttttaaattaaaaatgaagttttaaatcaatctaaagtatatatgagtaaacttggtctgacagttaccaatgcttaatcagtgaggcacctatctcagcgatctgtctatttcgttcatccatagttgcctgactccccgtcgtgtagataactacgatacgggagggcttaccatctggccccagtgctgcaatgataccgcgagacccacgctcaccggctccagatttatcagcaataaaccagccagccggaagggccgagcgcagaagtggtcctgcaactttatccgcctccatccagtctattaattgttgccgggaagctagagtaagtagttcgccagttaatagtttgcgcaacgttgttgccattgctacaggcatcgtggtgtcacgctcgtcgtttggtatggcttcattcagctccggttcccaacgatcaaggcgagttacatgatcccccatgttgtgcaaaaaagcggttagctccttcggtcctccgatcgttgtcagaagtaagttggccgcagtgttatcactcatggttatggcagcactgcataattctcttactgtcatgccatccgtaagatgcttttctgtgactggtgagtactcaaccaagtcattctgagaatagtgtatgcggcgaccgagttgctcttgcccggcgtcaatacgggataataccgcgccacatagcagaactttaaaagtgctcatcattggaaaacgttcttcggggcgaaaactctcaaggatcttaccgctgttgagatccagttcgatgtaacccactcgtgcacccaactgatcttcagcatcttttactttcaccagcgtttctgggtgagcaaaaacaggaaggcaaaatgccgcaaaaaagggaataagggcgacacggaaatgttgaatactcatactcttcctttttcaatattattgaagcatttatcagggttattgtctcatgagcggatacatatttgaatgtatttagaaaaataaacaaataggggttccgcgcacatttccccgaaaagtgccacctgacgtctaagaaaccattattatcatgacattaacctataaaaataggcgtatcacgaggccctttcgtc

SEQ ID NO: 144 - DNA, 7420 bp, Artificial Sequence
  Synthetic DNA
gagctcgtttaaacagcactgtagatcagacacgatatcgcgaggaggtgcagctgttggagtctgggggaggcttggtacagcctggggggtccctgagactctcctgtgcagcctctggattcacctttagcagctatgctatgcattgggtccgccaggctccagggaaggggctggagtgggtctcatggatcaacgctggcaatggtaacacaaaatattcacagaagttccagggccggttcaccatctccagagacaattccaagaacacgctgtatctgcaaatgaacagcctgagagccgaggacacggccgtatattactgtgcgaaagcgtctagtagtggttattactacgtccactttgactactggggccagggcaccctggtcaccgtctcctcagtgcctggtgactcttccgcaatcagtcctgggacagaaacctcagggacagcctttatgagttttgatcacatctaacagagaggatgggccagtgatacgtctcatagtagtgcgagagatacgaggtgcagctgttggagtctgggggaggcttggtacagcctggggggtccctgagactctcctgtgcagcctctggattcacctttagcagctatggtatcagctgggtccgccaggctccagggaaggggctggagtgggtctcatggatcagcgcttacaatggtaacacaaactatgcacagaagctccagggccggttcaccatctccagagacaattccaagaacacgctgtatctgcaaatgaacagcctgagagccgaggacacggccgtatattactgtgcgaaagatttaaggttatcctattactactttgactactggggccagggcaccctggtcaccgtctcctcagtgcctggtgactcttccgcaatcagtcctgggacagaaacctcagggacagcctttatgagttttgatcacatctaacagagaggatgggccagtctacgtagctgtactactcacgactacaggaggtgcagctgttggagtctgggggaggcttggtacagcctggggggtccctgagactctcctgtgcagcctctggattcacctttagcggctttgccatgaactgggtccgccaggctccagggaaggggctggagtgggtctcaactattagtaatagtgctggtagcacatattacgcagactccgtgaagggccggttcaccatctccagagacaattccaagaacacgctgtatctgcaaatgaacagcctgagagccgaggacacggccgtatattactgtgcgaaatatggggaggatattgtcgttgtgccagctcgctacggtgtggacgtctggggccagggcaccctggtcaccgtctcctcagtgcctggtgactcttccgcaatcagtcctgggacagaaacctcagggacagcctttatgagttttgatcacatctaacagagaggatgggccagtagagacgagtcgtcgctcgacatacgcgtgaggtgcagctgttggagtctgggggaggcttggtacagcctggggggtccctgagactctcctgtgcagcctctggattcacctttagcagctctgctgtgcagtgggtccgccaggctccagggaaggggctggagtgggtctcatggatcgtcgttggcagtggtaacacaaactacgcacagaagttccaggaacggttcaccatctccagagacaattccaagaacacgctgtatctgcaaatgaacagcctgagagccgaggacacggccgtatattactgtgcgaaagacgtccttgtagtaccagctgccccctactactactacggtatggacgtctggggccagggcaccctggtcaccgtctcctcagtgcctggtgactcttccgcaatcagtcctgggacagaaacctcagggacagcctttatgagttttgatcacatctaacagagaggatgggccagagactatactagcgtcgtctagtacgctatgaggtgcagctgttggagtctgggggaggcttggtacagcctggggggtccctgagactctcctgtgcagcctctggattcacctttagcactagtggagtgggtgtgggctgggtccgccaggctccagggaaggggctggagtgggtctcactcatttattggaatgatgataagcgctacagcccatctctgaagagccggttcaccatctccagagacaattccaagaacacgctgtatctgcaaatgaacagcctgagagccgaggacacggccgtatattactgtgcgaaagacgatggggcgtatgggccgtatagcagcgcctggacctttgactactggggccagggcaccctggtcaccgtctcctcagtgcctggtgactcttccgcaatcagtcctgggacagaaacctcagggacagcctttatgagttttgatcacatctaacagagaggatgggccagcgacgtgacttacacacacttacagatcgtgaggtgcagctgttggagtctgggggaggcttggtacagcctggggggtccctgagactctcctgtgcagcctctggattcacctttagcactagtggaatgcgtgtgagctgggtccgccaggctccagggaaggggctggagtgggtctcacgcattgattgggatgatgataaattctacagcacatctctgaagacccggttcaccatctccagagacaattccaagaacacgctgtatctgcaaatgaacagcctgagagccgaggacacggccgtatattactgtgcgaaagatgacggtggcaccccgcccggggaattctttgactactggggccagggcaccctggtcaccgtctcctcagtgcctggtgactcttccgcaatcagtcctgggacagaaacctcagggacagcctttatgagttttgatcacatctaacagagaggatgggccagtcgcactagttctagcgacttctatactatgaggtgcagctgttggagtctgggggaggcttggtacagcctggggggtccctgagactctcctgtgcagcctctggattcacctttagcgattatgccatgcactgggtccgccaggctccagggaaggggctggagtgggtctcaggtattagttggaatagtggtagcataggctatgcggactctgtgaagggccggttcaccatctccagagacaattccaagaacacgctgtatctgcaaatgaacagcctgagagccgaggacacggccgtatattactgtgcgaaaatagtgggagctacttacaactggttcgacccctggggccagggcaccctggtcaccgtctcctcagtgcctggtgactcttccgcaatcagtcctgggacagaaacctcagggacagcctttatgagttttgatcacatctaacagagaggatgggccagacgcgatcgaactagcagtaagctcacgtagaggtgcagctgttggagtctgggggaggcttggtacagcctggggggtccctgagactctcctgtgcagcctctggattcacctttagcaacgcctggatgagctgggtccgccaggctccagggaaggggctggagtgggtctcacgtattaaaagcaaaactgatggtgggacaacagactacgctgcacccgtgaaaggccggttcaccatctccagagacaattccaagaacacgctgtatctgcaaatgaacagcctgagagccgaggacacggccgtatattactgtgcgaaagaaaggggtagcagctcgtcctttgactactggggccagggcaccctggtcaccgtctcctcagtgcctggtgactcttccgcaatcagtcctgggacagaaacctcagggacagcctttatgagttttgatcacatctaacagagaggatgggccagcgatcgtatacgcagtacgacgcgtatacagaggtgcagctgttggagtctgggggaggcttggtacagcctggggggtccctgagactctcctgtgcagcctctggattcacctttagcagctatggcatgcactgggtccgccaggctccagggaaggggctggagtgggtctcagttatatggtatgatggaagtaataaatactatgcagactccgtgaagggccggttcaccatctccagagacaattccaagaacacgctgtatctgcaaatgaacagcctgagagccgaggacacggccgtatattactgtgcgaaagatcttgtcttcgggccagctgctactccttttgactactggggccagggcaccctggtcaccgtctcctcagtgcctggtgactcttccgcaatcagtcctgggacagaaacctcagggacagcctttatgagttttgatcacatctaacagagaggatgggccagctatagcgtatacgtcatcatagtcgcatagaggtgcagctgttggagtctgggggaggcttggtacagcctggggggtccctgagactctcctgtgcagcctctggattcacctttagcagcaactacatgagctgggtccgccaggctccagggaaggggctggagtgggtctcagttatttatagcggtggtagcacatactacgcagactccgtgaagggccggttcaccatctccagagacaattccaagaacacgctgtatctgcaaatgaacagcctgagagccgaggacacggccgtatattactgtgcgaaagcgaagttctcctatggttcagggagttattactttgactactggggccagggcaccctggtcaccgtctcctcagtgcctggtgactcttccgcaatcagtcctgggacagaaacctcagggacagcctttatgagttttgatcacatctaacagagaggatgggccagtcgatagtgatcgctgcgtatctgacgtcagaggtgcagctgttggagtctgggggaggcttggtacagcctggggggtccctgagactctcctgtgcagcctctggattcacctttagcagctactggatgcactgggtccgccaggctccagggaaggggctggagtgggtctcacgtattaatagtgatgggagtagcacaagctacgcggactccgtgaagggccggttcaccatctccagagacaattccaagaacacgctgtatctgcaaatgaacagcctgagagccgaggacacggccgtatattactgtgcgaaaggatattgtagtagtaccagctgctatgctgatgcttttgatatctggggccagggcaccctggtcaccgtctcctcagtgcctggtgactcttccgcaatcagtcctgggacagaaacctcagggacagcctttatgagttttgatcacatctaacagagaggatgggccagtgtcgtcgcaacacatacgcacagtcgtgcgaggtgcagctgttggagtctgggggaggcttggtacagcctggggggtccctgagactctcctgtgcagcctctggattcacctttagcagtagtaactggtggggctgggtccgccaggctccagggaaggggctggagtgggtctcatacatctattatagtgggagcacctactacaacccgtccctcaagagtcggttcaccatctccagagacaattccaagaacacgctgtatctgcaaatgaacagcctgagagccgaggacacggccgtatattactgtgcgaaagatcgaagtagagggggttttgactactggggccagggcaccctggtcaccgtctcctcagtgcctggtgactcttccgcaatcagtcctgggacagaaacctcagggacagcctttatgagttttgatcacatctaacagagaggatgggccagactcatctacactcgcgcacagagcgtcacgaggtgcagctgttggagtctgggggaggcttggtacagcctggggggtccctgagactctcctgtgcagcctctggattcacctttagcggttactactggagctgggtccgccaggctccagggaaggggctggagtgggtctcagaaatcaatcatagtggaagcaccaactacaacccgtccctcaagagtcggttcaccatctccagagacaattccaagaacacgctgtatctgcaaatgaacagcctgagagccgaggacacggccgtatattactgtgcgaaagcccgtaccagcgcgggcccgggtggtgcttttgatttctggggccagggcaccctggtcaccgtctcctcagtgcctggtgactcttccgcaatcagtcctgggacagaaacctcagggacagcctttatgagttttgatcacatctaacagagaggatgggccagagtgtatgtcatagatagacatatagtcgcgaggtgcagctgttggagtctgggggaggcttggtacagcctggggggtccctgagactctcctgtgcagcctctggattcacctttagcagctactggatcggctgggtccgccaggctccagggaaggggctggagtgggtctcaatcatctatcctggtgactctgataccagatacagcccgtccttccaaggccggttcaccatctccagagacaattccaagaacacgctgtatctgcaaatgaacagcctgagagccgaggacacggccgtatattactgtgcgaaaggggtttgtagtaccagctcgtacgccttttactactactactacggtatggacgtctggggccagggcaccctggtcaccgtctcctcagtgcctggtgactcttccgcaatcagtcctgggacagaaacctcagggacagcctttatgagttttgatcacatctaacagagaggatgggccagcatactctaccgacactatccgagacgcgcgaggtgcagctgttggagtctgggggaggcttggtacagcctggggggtccctgagactctcctgtgcagcctctggattcacctttagcagctatgctatgaattgggtccgccaggctccagggaaggggctggagtgggtctcatggatcaacaccaacactgggaacccaacgtatgcccagggcttcacaggacggttcaccatctccagagacaattccaagaacacgctgtatctgcaaatgaacagcctgagagccgaggacacggccgtatattactgtgcgaaagactacggtggtaactcctactggtacttcgatctctggggccagggcaccctggtcaccgtctcctcagtgcctggtgactcttccgcaatcagtcctgggacagaaacctcagggacagcctttatgagttttgatcacatctaacagagaggatgggccaggtttaaacggtacc

SEQ ID NO: 145 - DNA, 11635 bp, Artificial Sequence
  Synthetic DNA
tcgcgcgtttcggtgatgacggtgaaaacctctgacacatgcagctcccggagacggtcacagcttgtctgtaagcggatgccgggagcagacaagcccgtcagggcgcgtcagcgggtgttggcgggtgtcggggctggcttaactatgcggcatcagagcagattgtactgagagtgcaccatatgcggtgtgaaataccgcacagatgcgtaaggagaaaataccgcatcaggcgccattcgccattcaggctgcgcaactgttgggaagggcgatcggtgcgggcctcttcgctattacgccagctggcgaaagggggatgtgctgcaaggcgattaagttgggtaacgccagggttttcccagtcacgacgttgtaaaacgacggccagtgaattcatatgtagcttacgacactgataacttcgtatatggtattatatacgaagttataagcttcaccatgattgaacaagatggattgcacgcaggttctccggccgcttgggtggagaggctattcggctatgactgggcacaacagacaatcggctgctctgatgccgccgtgttccggctgtcagcgcaggggcgcccggttctttttgtcaagaccgacctgtccggtgccctgaatgaactgcaggacgaggcagcgcggctatcgtggctggccacgacgggcgttccttgcgcagctgtgctcgacgttgtcactgaagcgggaagggactggctgctattgggcgaagtgccggggcaggatctcctgtcatctcaccttgctcctgccgagaaagtatccatcatggctgatgcaatgcggcggctgcatacgcttgatccggctacctgcccattcgaccaccaagcgaaacatcgcatcgagcgagcacgtactcggatggaagccggtcttgtcgatcaggatgatctggacgaagagcatcaggggctcgcgccagccgaactgttcgccaggctcaaggcgcgcatgcccgacggcgaggatctcgtcgtgacccatggcgatgcctgcttgccgaatatcatggtggaaaatggccgcttttctggattcatcgactgtggccggctgggtgtggcggaccgctatcaggacatagcgttggctacccgtgatattgctgaagagcttggcggcgaatgggctgaccgcttcctcgtgctttacggtatcgccgctcccgattcgcagcgcatcgccttctatcgccttcttgacgagttcttctgaactagtgcgggactctggggttcgaaatgaccgaccaagcgacgcccaacctgccatcacgagatttcgattccaccgccgccttctatgaaaggttgggcttcggaatcgttttccgggacgccggctggatgatcctccagcgcggggatctcatgctggagttcttcgcccaccccaacttgtttattgcagcttataatggttacaaataaagcaatagcatcacaaatttcacaaataaagcatttttttcactgcattctagttgtggtttgtccaaactcatcaatgtatcttatcatgtctgttataccgtcgatctctagctagagcttggcgtaatcatggtcatagctgtttcctgtgtgcccaccccaacttgtttattgcagcttataatggttacaaataaagcaatagcatcacaaatttcacaaataaagcatttttttcactgcattctagttgtggtttgtccaaactcatcaatgtatcttatcatgtctgataacttcgtataatgtatgctatacgaacggtactcgagagctcgtttaaacagcactgtagatcagacacgatatcgcgaggaggtgcagctgttggagtctgggggaggcttggtacagcctggggggtccctgagactctcctgtgcagcctctggattcacctttagcagctatgctatgcattgggtccgccaggctccagggaaggggctggagtgggtctcatggatcaacgctggcaatggtaacacaaaatattcacagaagttccagggccggttcaccatctccagagacaattccaagaacacgctgtatctgcaaatgaacagcctgagagccgaggacacggccgtatattactgtgcgaaagcgtctagtagtggttattactacgtccactttgactactggggccagggcaccctggtcaccgtctcctcagtgcctggtgactcttccgcaatcagtcctgggacagaaacctcagggacagcctttatgagttttgatcacatctaacagagaggatgggccagtgatacgtctcatagtagtgcgagagatacgaggtgcagctgttggagtctgggggaggcttggtacagcctggggggtccctgagactctcctgtgcagcctctggattcacctttagcagctatggtatcagctgggtccgccaggctccagggaaggggctggagtgggtctcatggatcagcgcttacaatggtaacacaaactatgcacagaagctccagggccggttcaccatctccagagacaattccaagaacacgctgtatctgcaaatgaacagcctgagagccgaggacacggccgtatattactgtgcgaaagatttaaggttatcctattactactttgactactggggccagggcaccctggtcaccgtctcctcagtgcctggtgactcttccgcaatcagtcctgggacagaaacctcagggacagcctttatgagttttgatcacatctaacagagaggatgggccagtctacgtagctgtactactcacgactacaggaggtgcagctgttggagtctgggggaggcttggtacagcctggggggtccctgagactctcctgtgcagcctctggattcacctttagcggctttgccatgaactgggtccgccaggctccagggaaggggctggagtgggtctcaactattagtaatagtgctggtagcacatattacgcagactccgtgaagggccggttcaccatctccagagacaattccaagaacacgctgtatctgcaaatgaacagcctgagagccgaggacacggccgtatattactgtgcgaaatatggggaggatattgtcgttgtgccagctcgctacggtgtggacgtctggggccagggcaccctggtcaccgtctcctcagtgcctggtgactcttccgcaatcagtcctgggacagaaacctcagggacagcctttatgagttttgatcacatctaacagagaggatgggccagtagagacgagtcgtcgctcgacatacgcgtgaggtgcagctgttggagtctgggggaggcttggtacagcctggggggtccctgagactctcctgtgcagcctctggattcacctttagcagctctgctgtgcagtgggtccgccaggctccagggaaggggctggagtgggtctcatggatcgtcgttggcagtggtaacacaaactacgcacagaagttccaggaacggttcaccatctccagagacaattccaagaacacgctgtatctgcaaatgaacagcctgagagccgaggacacggccgtatattactgtgcgaaagacgtccttgtagtaccagctgccccctactactactacggtatggacgtctggggccagggcaccctggtcaccgtctcctcagtgcctggtgactcttccgcaatcagtcctgggacagaaacctcagggacagcctttatgagttttgatcacatctaacagagaggatgggccagagactatactagcgtcgtctagtacgctatgaggtgcagctgttggagtctgggggaggcttggtacagcctggggggtccctgagactctcctgtgcagcctctggattcacctttagcactagtggagtgggtgtgggctgggtccgccaggctccagggaaggggctggagtgggtctcactcatttattggaatgatgataagcgctacagcccatctctgaagagccggttcaccatctccagagacaattccaagaacacgctgtatctgcaaatgaacagcctgagagccgaggacacggccgtatattactgtgcgaaagacgatggggcgtatgggccgtatagcagcgcctggacctttgactactggggccagggcaccctggtcaccgtctcctcagtgcctggtgactcttccgcaatcagtcctgggacagaaacctcagggacagcctttatgagttttgatcacatctaacagagaggatgggccagcgacgtgacttacacacacttacagatcgtgaggtgcagctgttggagtctgggggaggcttggtacagcctggggggtccctgagactctcctgtgcagcctctggattcacctttagcactagtggaatgcgtgtgagctgggtccgccaggctccagggaaggggctggagtgggtctcacgcattgattgggatgatgataaattctacagcacatctctgaagacccggttcaccatctccagagacaattccaagaacacgctgtatctgcaaatgaacagcctgagagccgaggacacggccgtatattactgtgcgaaagatgacggtggcaccccgcccggggaattctttgactactggggccagggcaccctggtcaccgtctcctcagtgcctggtgactcttccgcaatcagtcctgggacagaaacctcagggacagcctttatgagttttgatcacatctaacagagaggatgggccagtcgcactagttctagcgacttctatactatgaggtgcagctgttggagtctgggggaggcttggtacagcctggggggtccctgagactctcctgtgcagcctctggattcacctttagcgattatgccatgcactgggtccgccaggctccagggaaggggctggagtgggtctcaggtattagttggaatagtggtagcataggctatgcggactctgtgaagggccggttcaccatctccagagacaattccaagaacacgctgtatctgcaaatgaacagcctgagagccgaggacacggccgtatattactgtgcgaaaatagtgggagctacttacaactggttcgacccctggggccagggcaccctggtcaccgtctcctcagtgcctggtgactcttccgcaatcagtcctgggacagaaacctcagggacagcctttatgagttttgatcacatctaacagagaggatgggccagacgcgatcgaactagcagtaagctcacgtagaggtgcagctgttggagtctgggggaggcttggtacagcctggggggtccctgagactctcctgtgcagcctctggattcacctttagcaacgcctggatgagctgggtccgccaggctccagggaaggggctggagtgggtctcacgtattaaaagcaaaactgatggtgggacaacagactacgctgcacccgtgaaaggccggttcaccatctccagagacaattccaagaacacgctgtatctgcaaatgaacagcctgagagccgaggacacggccgtatattactgtgcgaaagaaaggggtagcagctcgtcctttgactactggggccagggcaccctggtcaccgtctcctcagtgcctggtgactcttccgcaatcagtcctgggacagaaacctcagggacagcctttatgagttttgatcacatctaacagagaggatgggccagcgatcgtatacgcagtacgacgcgtatacagaggtgcagctgttggagtctgggggaggcttggtacagcctggggggtccctgagactctcctgtgcagcctctggattcacctttagcagctatggcatgcactgggtccgccaggctccagggaaggggctggagtgggtctcagttatatggtatgatggaagtaataaatactatgcagactccgtgaagggccggttcaccatctccagagacaattccaagaacacgctgtatctgcaaatgaacagcctgagagccgaggacacggccgtatattactgtgcgaaagatcttgtcttcgggccagctgctactccttttgactactggggccagggcaccctggtcaccgtctcctcagtgcctggtgactcttccgcaatcagtcctgggacagaaacctcagggacagcctttatgagttttgatcacatctaacagagaggatgggccagctatagcgtatacgtcatcatagtcgcatagaggtgcagctgttggagtctgggggaggcttggtacagcctggggggtccctgagactctcctgtgcagcctctggattcacctttagcagcaactacatgagctgggtccgccaggctccagggaaggggctggagtgggtctcagttatttatagcggtggtagcacatactacgcagactccgtgaagggccggttcaccatctccagagacaattccaagaacacgctgtatctgcaaatgaacagcctgagagccgaggacacggccgtatattactgtgcgaaagcgaagttctcctatggttcagggagttattactttgactactggggccagggcaccctggtcaccgtctcctcagtgcctggtgactcttccgcaatcagtcctgggacagaaacctcagggacagcctttatgagttttgatcacatctaacagagaggatgggccagtcgatagtgatcgctgcgtatctgacgtcagaggtgcagctgttggagtctgggggaggcttggtacagcctggggggtccctgagactctcctgtgcagcctctggattcacctttagcagctactggatgcactgggtccgccaggctccagggaaggggctggagtgggtctcacgtattaatagtgatgggagtagcacaagctacgcggactccgtgaagggccggttcaccatctccagagacaattccaagaacacgctgtatctgcaaatgaacagcctgagagccgaggacacggccgtatattactgtgcgaaaggatattgtagtagtaccagctgctatgctgatgcttttgatatctggggccagggcaccctggtcaccgtctcctcagtgcctggtgactcttccgcaatcagtcctgggacagaaacctcagggacagcctttatgagttttgatcacatctaacagagaggatgggccagtgtcgtcgcaacacatacgcacagtcgtgcgaggtgcagctgttggagtctgggggaggcttggtacagcctggggggtccctgagactctcctgtgcagcctctggattcacctttagcagtagtaactggtggggctgggtccgccaggctccagggaaggggctggagtgggtctcatacatctattatagtgggagcacctactacaacccgtccctcaagagtcggttcaccatctccagagacaattccaagaacacgctgtatctgcaaatgaacagcctgagagccgaggacacggccgtatattactgtgcgaaagatcgaagtagagggggttttgactactggggccagggcaccctggtcaccgtctcctcagtgcctggtgactcttccgcaatcagtcctgggacagaaacctcagggacagcctttatgagttttgatcacatctaacagagaggatgggccagactcatctacactcgcgcacagagcgtcacgaggtgcagctgttggagtctgggggaggcttggtacagcctggggggtccctgagactctcctgtgcagcctctggattcacctttagcggttactactggagctgggtccgccaggctccagggaaggggctggagtgggtctcagaaatcaatcatagtggaagcaccaactacaacccgtccctcaagagtcggttcaccatctccagagacaattccaagaacacgctgtatctgcaaatgaacagcctgagagccgaggacacggccgtatattactgtgcgaaagcccgtaccagcgcgggcccgggtggtgcttttgatttctggggccagggcaccctggtcaccgtctcctcagtgcctggtgactcttccgcaatcagtcctgggacagaaacctcagggacagcctttatgagttttgatcacatctaacagagaggatgggccagagtgtatgtcatagatagacatatagtcgcgaggtgcagctgttggagtctgggggaggcttggtacagcctggggggtccctgagactctcctgtgcagcctctggattcacctttagcagctactggatcggctgggtccgccaggctccagggaaggggctggagtgggtctcaatcatctatcctggtgactctgataccagatacagcccgtccttccaaggccggttcaccatctccagagacaattccaagaacacgctgtatctgcaaatgaacagcctgagagccgaggacacggccgtatattactgtgcgaaaggggtttgtagtaccagctcgtacgccttttactactactactacggtatggacgtctggggccagggcaccctggtcaccgtctcctcagtgcctggtgactcttccgcaatcagtcctgggacagaaacctcagggacagcctttatgagttttgatcacatctaacagagaggatgggccagcatactctaccgacactatccgagacgcgcgaggtgcagctgttggagtctgggggaggcttggtacagcctggggggtccctgagactctcctgtgcagcctctggattcacctttagcagctatgctatgaattgggtccgccaggctccagggaaggggctggagtgggtctcatggatcaacaccaacactgggaacccaacgtatgcccagggcttcacaggacggttcaccatctccagagacaattccaagaacacgctgtatctgcaaatgaacagcctgagagccgaggacacggccgtatattactgtgcgaaagactacggtggtaactcctactggtacttcgatctctggggccagggcaccctggtcaccgtctcctcagtgcctggtgactcttccgcaatcagtcctgggacagaaacctcagggacagcctttatgagttttgatcacatctaacagagaggatgggccaggtttaaacggtaccgctagcatgctggccaggatccatgcccatggccgcggatgcggcgcgccatcgatatgcgtcgacatttaaatgggccccccggtgatatccccgggtctagagcggccgctaccgttcgtatattctatcttatacgaagttatatcgaattcctgcagagatctagcttggcgtaatcatggtcatagctgtttcctgtgtgaaattgttatccgctcacaattccacacaacatacgagccggaagcataaagtgtaaagcctggggtgcctaatgagtgagctaactcacattaattgcgttgcgctcactgcccgctttccagtcgggaaacctgtcgtgccagctgcattaatgaatcggccaacgcgcggggagaggcggtttgcgtattgggcgctcttccgcttcctcgctcactgactcgctgcgctcggtcgttcggctgcggcgagcggtatcagctcactcaaaggcggtaatacggttatccacagaatcaggggataacgcaggaaagaacatgtgagcaaaaggccagcaaaaggccaggaaccgtaaaaaggccgcgttgctggcgtttttccataggctccgcccccctgacgagcatcacaaaaatcgacgctcaagtcagaggtggcgaaacccgacaggactataaagataccaggcgtttccccctggaagctccctcgtgcgctctcctgttccgaccctgccgcttaccggatacctgtccgcctttctcccttcgggaagcgtggcgctttctcatagctcacgctgtaggtatctcagttcggtgtaggtcgttcgctccaagctgggctgtgtgcacgaaccccccgttcagcccgaccgctgcgccttatccggtaactatcgtcttgagtccaacccggtaagacacgacttatcgccactggcagcagccactggtaacaggattagcagagcgaggtatgtaggcggtgctacagagttcttgaagtggtggcctaactacggctacactagaagaacagtatttggtatctgcgctctgctgaagccagttaccttcggaaaaagagttggtagctcttgatccggcaaacaaaccaccgctggtagcggtggtttttttgtttgcaagcagcagattacgcgcagaaaaaaaggatctcaagaagatcctttgatcttttctacggggtctgacgctcagtggaacgaaaactcacgttaagggattttggtcatgagattatcaaaaaggatcttcacctagatccttttaaattaaaaatgaagttttaaatcaatctaaagtatatatgagtaaacttggtctgacagttaccaatgcttaatcagtgaggcacctatctcagcgatctgtctatttcgttcatccatagttgcctgactccccgtcgtgtagataactacgatacgggagggcttaccatctggccccagtgctgcaatgataccgcgagacccacgctcaccggctccagatttatcagcaataaaccagccagccggaagggccgagcgcagaagtggtcctgcaactttatccgcctccatccagtctattaattgttgccgggaagctagagtaagtagttcgccagttaatagtttgcgcaacgttgttgccattgctacaggcatcgtggtgtcacgctcgtcgtttggtatggcttcattcagctccggttcccaacgatcaaggcgagttacatgatcccccatgttgtgcaaaaaagcggttagctccttcggtcctccgatcgttgtcagaagtaagttggccgcagtgttatcactcatggttatggcagcactgcataattctcttactgtcatgccatccgtaagatgcttttctgtgactggtgagtactcaaccaagtcattctgagaatagtgtatgcggcgaccgagttgctcttgcccggcgtcaatacgggataataccgcgccacatagcagaactttaaaagtgctcatcattggaaaacgttcttcggggcgaaaactctcaaggatcttaccgctgttgagatccagttcgatgtaacccactcgtgcacccaactgatcttcagcatcttttactttcaccagcgtttctgggtgagcaaaaacaggaaggcaaaatgccgcaaaaaagggaataagggcgacacggaaatgttgaatactcatactcttcctttttcaatattattgaagcatttatcagggttattgtctcatgagcggatacatatttgaatgtatttagaaaaataaacaaataggggttccgcgcacatttccccgaaaagtgccacctgacgtctaagaaaccattattatcatgacattaacctataaaaataggcgtatcacgaggccctttcgtc

SEQ ID NO: 146 - DNA, 11624 bp, Artificial Sequence
  Synthetic DNA
tcgcgcgtttcggtgatgacggtgaaaacctctgacacatgcagctcccggagacggtcacagcttgtctgtaagcggatgccgggagcagacaagcccgtcagggcgcgtcagcgggtgttggcgggtgtcggggctggcttaactatgcggcatcagagcagattgtactgagagtgcaccatatgcggtgtgaaataccgcacagatgcgtaaggagaaaataccgcatcaggcgccattcgccattcaggctgcgcaactgttgggaagggcgatcggtgcgggcctcttcgctattacgccagctggcgaaagggggatgtgctgcaaggcgattaagttgggtaacgccagggttttcccagtcacgacgttgtaaaacgacggccagtgaattcatatgtagcttacgacactgataacttcgtatatggtattatatacgaagttataagcttcaccatgattgaacaagatggattgcacgcaggttctccggccgcttgggtggagaggctattcggctatgactgggcacaacagacaatcggctgctctgatgccgccgtgttccggctgtcagcgcaggggcgcccggttctttttgtcaagaccgacctgtccggtgccctgaatgaactgcaggacgaggcagcgcggctatcgtggctggccacgacgggcgttccttgcgcagctgtgctcgacgttgtcactgaagcgggaagggactggctgctattgggcgaagtgccggggcaggatctcctgtcatctcaccttgctcctgccgagaaagtatccatcatggctgatgcaatgcggcggctgcatacgcttgatccggctacctgcccattcgaccaccaagcgaaacatcgcatcgagcgagcacgtactcggatggaagccggtcttgtcgatcaggatgatctggacgaagagcatcaggggctcgcgccagccgaactgttcgccaggctcaaggcgcgcatgcccgacggcgaggatctcgtcgtgacccatggcgatgcctgcttgccgaatatcatggtggaaaatggccgcttttctggattcatcgactgtggccggctgggtgtggcggaccgctatcaggacatagcgttggctacccgtgatattgctgaagagcttggcggcgaatgggctgaccgcttcctcgtgctttacggtatcgccgctcccgattcgcagcgcatcgccttctatcgccttcttgacgagttcttctgaactagtgcgggactctggggttcgaaatgaccgaccaagcgacgcccaacctgccatcacgagatttcgattccaccgccgccttctatgaaaggttgggcttcggaatcgttttccgggacgccggctggatgatcctccagcgcggggatctcatgctggagttcttcgcccaccccaacttgtttattgcagcttataatggttacaaataaagcaatagcatcacaaatttcacaaataaagcatttttttcactgcattctagttgtggtttgtccaaactcatcaatgtatcttatcatgtctgttataccgtcgatctctagctagagcttggcgtaatcatggtcatagctgtttcctgtgtgcccaccccaacttgtttattgcagcttataatggttacaaataaagcaatagcatcacaaatttcacaaataaagcatttttttcactgcattctagttgtggtttgtccaaactcatcaatgtatcttatcatgtctgataacttcgtataatgtatgctatacgaacggtactcgagagctcatgcggtaccgtttaaacctggcccatcctctctgttagatgtgatcaaaactcataaaggctgtccctgaggtttctgtcccaggactgattgcggaagagtcaccaggcactgaggagacggtgaccagggtgccctggccccagagatcgaagtaccagtaggagttaccaccgtagtctttcgcacagtaatatacggccgtgtcctcggctctcaggctgttcatttgcagatacagcgtgttcttggaattgtctctggagatggtgaaccgtcctgtgaagccctgggcatacgttgggttcccagtgttggtgttgatccatgagacccactccagccccttccctggagcctggcggacccaattcatagcatagctgctaaaggtgaatccagaggctgcacaggagagtctcagggaccccccaggctgtaccaagcctcccccagactccaacagctgcacctcgcgcgtctcggatagtgtcggtagagtatgctggcccatcctctctgttagatgtgatcaaaactcataaaggctgtccctgaggtttctgtcccaggactgattgcggaagagtcaccaggcactgaggagacggtgaccagggtgccctggccccagacgtccataccgtagtagtagtagtaaaaggcgtacgagctggtactacaaacccctttcgcacagtaatatacggccgtgtcctcggctctcaggctgttcatttgcagatacagcgtgttcttggaattgtctctggagatggtgaaccggccttggaaggacgggctgtatctggtatcagagtcaccaggatagatgattgagacccactccagccccttccctggagcctggcggacccagccgatccagtagctgctaaaggtgaatccagaggctgcacaggagagtctcagggaccccccaggctgtaccaagcctcccccagactccaacagctgcacctcgcgactatatgtctatctatgacatacactctggcccatcctctctgttagatgtgatcaaaactcataaaggctgtccctgaggtttctgtcccaggactgattgcggaagagtcaccaggcactgaggagacggtgaccagggtgccctggccccagaaatcaaaagcaccacccgggcccgcgctggtacgggctttcgcacagtaatatacggccgtgtcctcggctctcaggctgttcatttgcagatacagcgtgttcttggaattgtctctggagatggtgaaccgactcttgagggacgggttgtagttggtgcttccactatgattgatttctgagacccactccagccccttccctggagcctggcggacccagctccagtagtaaccgctaaaggtgaatccagaggctgcacaggagagtctcagggaccccccaggctgtaccaagcctcccccagactccaacagctgcacctcgtgacgctctgtgcgcgagtgtagatgagtctggcccatcctctctgttagatgtgatcaaaactcataaaggctgtccctgaggtttctgtcccaggactgattgcggaagagtcaccaggcactgaggagacggtgaccagggtgccctggccccagtagtcaaaaccccctctacttcgatctttcgcacagtaatatacggccgtgtcctcggctctcaggctgttcatttgcagatacagcgtgttcttggaattgtctctggagatggtgaaccgactcttgagggacgggttgtagtaggtgctcccactataatagatgtatgagacccactccagccccttccctggagcctggcggacccagccccaccagttactactgctaaaggtgaatccagaggctgcacaggagagtctcagggaccccccaggctgtaccaagcctcccccagactccaacagctgcacctcgcacgactgtgcgtatgtgttgcgacgacactggcccatcctctctgttagatgtgatcaaaactcataaaggctgtccctgaggtttctgtcccaggactgattgcggaagagtcaccaggcactgaggagacggtgaccagggtgccctggccccagatatcaaaagcatcagcatagcagctggtactactacaatatcctttcgcacagtaatatacggccgtgtcctcggctctcaggctgttcatttgcagatacagcgtgttcttggaattgtctctggagatggtgaaccggcccttcacggagtccgcgtagcttgtgctactcccatcactattaatacgtgagacccactccagccccttccctggagcctggcggacccagtgcatccagtagctgctaaaggtgaatccagaggctgcacaggagagtctcagggaccccccaggctgtaccaagcctcccccagactccaacagctgcacctctgacgtcagatacgcagcgatcactatcgactggcccatcctctctgttagatgtgatcaaaactcataaaggctgtccctgaggtttctgtcccaggactgattgcggaagagtcaccaggcactgaggagacggtgaccagggtgccctggccccagtagtcaaagtaataactccctgaaccataggagaacttcgctttcgcacagtaatatacggccgtgtcctcggctctcaggctgttcatttgcagatacagcgtgttcttggaattgtctctggagatggtgaaccggcccttcacggagtctgcgtagtatgtgctaccaccgctataaataactgagacccactccagccccttccctggagcctggcggacccagctcatgtagttgctgctaaaggtgaatccagaggctgcacaggagagtctcagggaccccccaggctgtaccaagcctcccccagactccaacagctgcacctctatgcgactatgatgacgtatacgctatagctggcccatcctctctgttagatgtgatcaaaactcataaaggctgtccctgaggtttctgtcccaggactgattgcggaagagtcaccaggcactgaggagacggtgaccagggtgccctggccccagtagtcaaaaggagtagcagctggcccgaagacaagatctttcgcacagtaatatacggccgtgtcctcggctctcaggctgttcatttgcagatacagcgtgttcttggaattgtctctggagatggtgaaccggcccttcacggagtctgcatagtatttattacttccatcataccatataactgagacccactccagccccttccctggagcctggcggacccagtgcatgccatagctgctaaaggtgaatccagaggctgcacaggagagtctcagggaccccccaggctgtaccaagcctcccccagactccaacagctgcacctctgtatacgcgtcgtactgcgtatacgatcgctggcccatcctctctgttagatgtgatcaaaactcataaaggctgtccctgaggtttctgtcccaggactgattgcggaagagtcaccaggcactgaggagacggtgaccagggtgccctggccccagtagtcaaaggacgagctgctacccctttctttcgcacagtaatatacggccgtgtcctcggctctcaggctgttcatttgcagatacagcgtgttcttggaattgtctctggagatggtgaaccggcctttcacgggtgcagcgtagtctgttgtcccaccatcagttttgcttttaatacgtgagacccactccagccccttccctggagcctggcggacccagctcatccaggcgttgctaaaggtgaatccagaggctgcacaggagagtctcagggaccccccaggctgtaccaagcctcccccagactccaacagctgcacctctacgtgagcttactgctagttcgatcgcgtctggcccatcctctctgttagatgtgatcaaaactcataaaggctgtccctgaggtttctgtcccaggactgattgcggaagagtcaccaggcactgaggagacggtgaccagggtgccctggccccaggggtcgaaccagttgtaagtagctcccactattttcgcacagtaatatacggccgtgtcctcggctctcaggctgttcatttgcagatacagcgtgttcttggaattgtctctggagatggtgaaccggcccttcacagagtccgcatagcctatgctaccactattccaactaatacctgagacccactccagccccttccctggagcctggcggacccagtgcatggcataatcgctaaaggtgaatccagaggctgcacaggagagtctcagggaccccccaggctgtaccaagcctcccccagactccaacagctgcacctcatagtatagaagtcgctagaactagtgcgactggcccatcctctctgttagatgtgatcaaaactcataaaggctgtccctgaggtttctgtcccaggactgattgcggaagagtcaccaggcactgaggagacggtgaccagggtgccctggccccagtagtcaaagaattccccgggcggggtgccaccgtcatctttcgcacagtaatatacggccgtgtcctcggctctcaggctgttcatttgcagatacagcgtgttcttggaattgtctctggagatggtgaaccgggtcttcagagatgtgctgtagaatttatcatcatcccaatcaatgcgtgagacccactccagccccttccctggagcctggcggacccagctcacacgcattccactagtgctaaaggtgaatccagaggctgcacaggagagtctcagggaccccccaggctgtaccaagcctcccccagactccaacagctgcacctcacgatctgtaagtgtgtgtaagtcacgtcgctggcccatcctctctgttagatgtgatcaaaactcataaaggctgtccctgaggtttctgtcccaggactgattgcggaagagtcaccaggcactgaggagacggtgaccagggtgccctggccccagtagtcaaaggtccaggcgctgctatacggcccatacgccccatcgtctttcgcacagtaatatacggccgtgtcctcggctctcaggctgttcatttgcagatacagcgtgttcttggaattgtctctggagatggtgaaccggctcttcagagatgggctgtagcgcttatcatcattccaataaatgagtgagacccactccagccccttccctggagcctggcggacccagcccacacccactccactagtgctaaaggtgaatccagaggctgcacaggagagtctcagggaccccccaggctgtaccaagcctcccccagactccaacagctgcacctcatagcgtactagacgacgctagtatagtctctggcccatcctctctgttagatgtgatcaaaactcataaaggctgtccctgaggtttctgtcccaggactgattgcggaagagtcaccaggcactgaggagacggtgaccagggtgccctggccccagacgtccataccgtagtagtagtagggggcagctggtactacaaggacgtctttcgcacagtaatatacggccgtgtcctcggctctcaggctgttcatttgcagatacagcgtgttcttggaattgtctctggagatggtgaaccgttcctggaacttctgtgcgtagtttgtgttaccactgccaacgacgatccatgagacccactccagccccttccctggagcctggcggacccactgcacagcagagctgctaaaggtgaatccagaggctgcacaggagagtctcagggaccccccaggctgtaccaagcctcccccagactccaacagctgcacctcacgcgtatgtcgagcgacgactcgtctctactggcccatcctctctgttagatgtgatcaaaactcataaaggctgtccctgaggtttctgtcccaggactgattgcggaagagtcaccaggcactgaggagacggtgaccagggtgccctggccccagacgtccacaccgtagcgagctggcacaacgacaatatcctccccatatttcgcacagtaatatacggccgtgtcctcggctctcaggctgttcatttgcagatacagcgtgttcttggaattgtctctggagatggtgaaccggcccttcacggagtctgcgtaatatgtgctaccagcactattactaatagttgagacccactccagccccttccctggagcctggcggacccagttcatggcaaagccgctaaaggtgaatccagaggctgcacaggagagtctcagggaccccccaggctgtaccaagcctcccccagactccaacagctgcacctcctgtagtcgtgagtagtacagctacgtagactggcccatcctctctgttagatgtgatcaaaactcataaaggctgtccctgaggtttctgtcccaggactgattgcggaagagtcaccaggcactgaggagacggtgaccagggtgccctggccccagtagtcaaagtagtaataggataaccttaaatctttcgcacagtaatatacggccgtgtcctcggctctcaggctgttcatttgcagatacagcgtgttcttggaattgtctctggagatggtgaaccggccctggagcttctgtgcatagtttgtgttaccattgtaagcgctgatccatgagacccactccagccccttccctggagcctggcggacccagctgataccatagctgctaaaggtgaatccagaggctgcacaggagagtctcagggaccccccaggctgtaccaagcctcccccagactccaacagctgcacctcgtatctctcgcactactatgagacgtatcactggcccatcctctctgttagatgtgatcaaaactcataaaggctgtccctgaggtttctgtcccaggactgattgcggaagagtcaccaggcactgaggagacggtgaccagggtgccctggccccagtagtcaaagtggacgtagtaataaccactactagacgctttcgcacagtaatatacggccgtgtcctcggctctcaggctgttcatttgcagatacagcgtgttcttggaattgtctctggagatggtgaaccggccctggaacttctgtgaatattttgtgttaccattgccagcgttgatccatgagacccactccagccccttccctggagcctggcggacccaatgcatagcatagctgctaaaggtgaatccagaggctgcacaggagagtctcagggaccccccaggctgtaccaagcctcccccagactccaacagctgcacctcctcgcgatatcgtgtctgatctacagtgctgtttaaacgagctcgctagcggatcccgcggatgcggcgcgccatcgatatgcgtcgacatttaaatgggccccccggtgatatccccgggtctagagcggccgctaccgttcgtatattctatcttatacgaagttatatcgaattcctgcagagatctagcttggcgtaatcatggtcatagctgtttcctgtgtgaaattgttatccgctcacaattccacacaacatacgagccggaagcataaagtgtaaagcctggggtgcctaatgagtgagctaactcacattaattgcgttgcgctcactgcccgctttccagtcgggaaacctgtcgtgccagctgcattaatgaatcggccaacgcgcggggagaggcggtttgcgtattgggcgctcttccgcttcctcgctcactgactcgctgcgctcggtcgttcggctgcggcgagcggtatcagctcactcaaaggcggtaatacggttatccacagaatcaggggataacgcaggaaagaacatgtgagcaaaaggccagcaaaaggccaggaaccgtaaaaaggccgcgttgctggcgtttttccataggctccgcccccctgacgagcatcacaaaaatcgacgctcaagtcagaggtggcgaaacccgacaggactataaagataccaggcgtttccccctggaagctccctcgtgcgctctcctgttccgaccctgccgcttaccggatacctgtccgcctttctcccttcgggaagcgtggcgctttctcatagctcacgctgtaggtatctcagttcggtgtaggtcgttcgctccaagctgggctgtgtgcacgaaccccccgttcagcccgaccgctgcgccttatccggtaactatcgtcttgagtccaacccggtaagacacgacttatcgccactggcagcagccactggtaacaggattagcagagcgaggtatgtaggcggtgctacagagttcttgaagtggtggcctaactacggctacactagaagaacagtatttggtatctgcgctctgctgaagccagttaccttcggaaaaagagttggtagctcttgatccggcaaacaaaccaccgctggtagcggtggtttttttgtttgcaagcagcagattacgcgcagaaaaaaaggatctcaagaagatcctttgatcttttctacggggtctgacgctcagtggaacgaaaactcacgttaagggattttggtcatgagattatcaaaaaggatcttcacctagatccttttaaattaaaaatgaagttttaaatcaatctaaagtatatatgagtaaacttggtctgacagttaccaatgcttaatcagtgaggcacctatctcagcgatctgtctatttcgttcatccatagttgcctgactccccgtcgtgtagataactacgatacgggagggcttaccatctggccccagtgctgcaatgataccgcgagacccacgctcaccggctccagatttatcagcaataaaccagccagccggaagggccgagcgcagaagtggtcctgcaactttatccgcctccatccagtctattaattgttgccgggaagctagagtaagtagttcgccagttaatagtttgcgcaacgttgttgccattgctacaggcatcgtggtgtcacgctcgtcgtttggtatggcttcattcagctccggttcccaacgatcaaggcgagttacatgatcccccatgttgtgcaaaaaagcggttagctccttcggtcctccgatcgttgtcagaagtaagttggccgcagtgttatcactcatggttatggcagcactgcataattctcttactgtcatgccatccgtaagatgcttttctgtgactggtgagtactcaaccaagtcattctgagaatagtgtatgcggcgaccgagttgctcttgcccggcgtcaatacgggataataccgcgccacatagcagaactttaaaagtgctcatcattggaaaacgttcttcggggcgaaaactctcaaggatcttaccgctgttgagatccagttcgatgtaacccactcgtgcacccaactgatcttcagcatcttttactttcaccagcgtttctgggtgagcaaaaacaggaaggcaaaatgccgcaaaaaagggaataagggcgacacggaaatgttgaatactcatactcttcctttttcaatattattgaagcatttatcagggttattgtctcatgagcggatacatatttgaatgtatttagaaaaataaacaaataggggttccgcgcacatttccccgaaaagtgccacctgacgtctaagaaaccattattatcatgacattaacctataaaaataggcgtatcacgaggccctttcgtc

SEQ ID NO: 147 - DNA, 339 bp, Artificial Sequence
  Synthetic DNA
gaggtgcagctgttggagtctgggggaggcttggtacagcctggggggtccctgagactctcctgtgcagcctctggattcacctttagcatctatgtcatgagctgggtccgccaggctccagggaaggggctggagtgggtctcagctattagtgctagtggtgataacacatactacgcagactccgtgaagggccggttcaccatctccagagacaattccaagaacacgctgtatctgcaaatgaacagcctgagagccgaggacacggccgtatattactgtgcgaaaacccctacttactggggccagggcaccctggtcaccgtctcctca

SEQ ID NO: 148 - DNA, 354 bp, Artificial Sequence
  Synthetic DNA
gaggtgcagctgttggagtctgggggaggcttggtacagcctggggggtccctgagactctcctgtgcagcctctggattcacctttagcagctttttcatgaactgggtccgccaggctccagggaaggggctggagtgggtctcaactattagtgccagtgatggtaggacacactacgcagactccgtgaagggccggttcaccatctccagagacaattccaagaacacgctgtatctgcaaatgaacagcctgagagccgaggacacggccgtatattactgtgcgaaagatctccactggtacggtatggacgcctggggccagggcaccctggtcaccgtctcctca

SEQ ID NO: 149 - DNA, 375 bp, Artificial Sequence
  Synthetic DNA
gaggtgcagctgttggagtctgggggaggcttggtacagcctggggggtccctgagactctcctgtgcagcctctggattcacctttagcagctttgacatgagctgggtccgccaggctccagggaaggggctggagtgggtctcaagtattagtggtagtggtattagaacatattacgcagactccgtgaagggccggttcaccatctccagagacaattccaagaacacgctgtatctgcaaatgaacagcctgagagccgaggacacggccgtatattactgtgcgaaagatggggtgtatagcagtggccagtactaccattacggtatggacgtctggggccagggcaccctggtcaccgtctcctca

SEQ ID NO: 150 - DNA, 387 bp, Artificial Sequence
  Synthetic DNA
gaggtgcagctgttggagtctgggggaggcttggtacagcctggggggtccctgagactctcctgtgcagcctctggattcacctttagcacctttgtcatgacgtgggtccgccaggctccagggaaggggctggagtgggtctcagctattactggtagtgggggtgacacatactacgcagactccgtgaagggccggttcaccatctccagagacaattccaagaacacgctgtatctgcaaatgaacagcctgagagccgaggacacggccgtatattactgtgcgaaagatctccacgtagaagatgttttggctggagaagatgttttggctgggggtctggacgtctggggccagggcaccctggtcaccgtctcctca

SEQ ID NO: 151 - DNA, 363 bp, Artificial Sequence
  Synthetic DNA
gaggtgcagctgttggagtctgggggaggcttggtacagcctggggggtccctgagactctcctgtgcagcctctggattcacctttagcaagtaccttatgaggtgggtccgccaggctccagggaaggggctggagtgggtctcaagtattagtgacagtggtgaaggcccaacctattcagactccgtgaagggccggttcaccatctccagagacaattccaagaacacgctgtatctgcaaatgaacagcctgagagccgaggacacggccgtatattactgtgcgaaatgcgatggttcggggcgtgactgcggtatggacgtctggggccagggcaccctggtcaccgtctcctca

SEQ ID NO: 152 - DNA, 339 bp, Artificial Sequence
  Synthetic DNA
gaggtgcagctgttggagtctgggggaggcttggtacagcctggggggtccctgagactctcctgtgcagcctctggattcacctttagcaactatgccatgacctgggtccgccaggctccagggaaggggctggagtgggtctcagctattagtaattatggtggtagcacatactactcagactccgtgaagggccggttcaccatctccagagacaattccaagaacacgctgtatctgcaaatgaacagcctgagagccgaggacacggccgtatattactgtgcgaaatactttgacttctggggccagggcaccctggtcaccgtctcctca

SEQ ID NO: 153 - DNA, 381 bp, Artificial Sequence
  Synthetic DNA
gaggtgcagctgttggagtctgggggaggcttggtacagcctggggggtccctgagactctcctgtgcagcctctggattcacctttagcacctatgtcatgggctgggtccgccaggctccagggaaggggctggagtgggtctcaggtattagtggtcgtggtggtagcacatactacgcagactccgtgaagggccggttcaccatctccagagacaattccaagaacacgctgtatctgcaaatgaacagcctgagagccgaggacacggccgtatattactgtgcgaaagacaactcttacgatttttggagaggttactactactactacggtatggacgtctggggccagggcaccctggtcaccgtctcctca

SEQ ID NO: 154 - DNA, 369 bp, Artificial Sequence
  Synthetic DNA
gaggtgcagctgttggagtctgggggaggcttggtacagcctggggggtccctgagactctcctgtgcagcctctggattcacctttagcagctattccatgagctgggtccgccaggctccagggaaggggctggagtgggtctcagctattagtggcactggtggtgccatatactacgcagactccgtgaagggccggttcaccatctccagagacaattccaagaacacgctgtatctgcaaatgaacagcctgagagccgaggacacggccgtatattactgtgcgaaagggggtctcaccaaatattgtagtggtgattactgtcactattggggccagggcaccctggtcaccgtctcctca

SEQ ID NO: 155 - DNA, 351 bp, Artificial Sequence
  Synthetic DNA
gaggtgcagctgttggagtctgggggaggcttggtacagcctggggggtccctgagactctcctgtgcagcctctggattcacctttagcaactttgccatgacctgggtccgccaggctccagggaaggggctggagtgggtctcaactgttactagtagtggtgctggcacatactacgcagactccgtgaagggccggttcaccatctccagagacaattccaagaacacgctgtatctgcaaatgaacagcctgagagccgaggacacggccgtatattactgtgcgaaatctcttggcagcagccttgactactggggccagggcaccctggtcaccgtctcctca

SEQ ID NO: 156 - DNA, 360 bp, Artificial Sequence
  Synthetic DNA
gaggtgcagctgttggagtctgggggaggcttggtacagcctggggggtccctgagactctcctgtgcagcctctggattcacctttagcaactttgacctcagctgggtccgccaggctccagggaaggggctggagtgggtctcagctattcgtggtagcggtagtagcgctttctacgcagactccgtgcagggccggttcaccatctccagagacaattccaagaacacgctgtatctgcaaatgaacagcctgagagccgaggacacggccgtatattactgtgcgaaattatcctggcattactctggttgggggaatccttggggccagggcaccctggtcaccgtctcctca

SEQ ID NO: 157 - DNA, 357 bp, Artificial Sequence
  Synthetic DNA
gaggtgcagctgttggagtctgggggaggcttggtacagcctggggggtccctgagactctcctgtgcagcctctggattcacctttagcaactttggcatggactgggtccgccaggctccagggaaggggctggagtgggtctcaactattactgtcagtggtgaaaacacatattacgcagactccgtgaagggccggttcaccatctccagagacaattccaagaacacgctgtatctgcaaatgaacagcctgagagccgaggacacggccgtatattactgtgcgaaaggctttagcagtggctggtcatttgactactggggccagggcaccctggtcaccgtctcctca

SEQ ID NO: 158 - DNA, 363 bp, Artificial Sequence
  Synthetic DNA
gaggtgcagctgttggagtctgggggaggcttggtacagcctggggggtccctgagactctcctgtgcagcctctggattcacctttagcagttatgccctgagctgggtccgccaggctccagggaaggggctggagtgggtctcacttgttagtggtagtgctattagtacatactacgcagactccgtgaagggccggttcaccatctccagagacaattccaagaacacgctgtatctgcaaatgaacagcctgagagccgaggacacggccgtatattactgtgcgaaaggggctcgagcccacctctactacgatatggacgtctggggccagggcaccctggtcaccgtctcctca

SEQ ID NO: 159 - DNA, 360 bp, Artificial Sequence
  Synthetic DNA
gaggtgcagctgttggagtctgggggaggcttggtacagcctggggggtccctgagactctcctgtgcagcctctggattcacctttagcacctttttcatgagctgggtccgccaggctccagggaaggggctggagtgggtctcaactaatactggtgatggtggtagtacatactactcagactccgtgaagggccggttcaccatctccagagacaattccaagaacacgctgtatctgcaaatgaacagcctgagagccgaggacacggccgtatattactgtgcgaaaactactatggttcggggagttatgcttgactactggggccagggcaccctggtcaccgtctcctca

SEQ ID NO: 160 - DNA, 375 bp, Artificial Sequence
  Synthetic DNA
gaggtgcagctgttggagtctgggggaggcttggtacagcctggggggtccctgagactctcctgtgcagcctctggattcacctttagcagatatgccatgggctgggtccgccaggctccagggaaggggctggagtgggtctcaagtatgagtgctagtgctggcagcacatactacgcagactccgtgaggggccggttcaccatctccagagacaattccaagaacacgctgtatctgcaaatgaacagcctgagagccgaggacacggccgtatattactgtgcgaaagatctggttcacgcggatatagtggccctggggtgtggccctgactactggggccagggcaccctggtcaccgtctcctca

SEQ ID NO: 161 - DNA, 381 bp, Artificial Sequence
  Synthetic DNA
gaggtgcagctgttggagtctgggggaggcttggtacagcctggggggtccctgagactctcctgtgcagcctctggattcacctttagcaactttgccataagctgggtccgccaggctccagggaaggggctggagtgggtctcaggtatcagtggtactggtggtaggacatactacgcagactccgtgaagggccggttcaccatctccagagacaattccaagaacacgctgtatctgcaaatgaacagcctgagagccgaggacacggccgtatattactgtgcgaaaggggtcgatgctacatatagtgccacctggtacgtggggggctactatgagtattggggccagggcaccctggtcaccgtctcctca

SEQ ID NO: 162 - DNA, 6974 bp, Artificial Sequence
  Synthetic DNA
ccgcggggcgcgccgaggtgcagctgttggagtctgggggaggcttggtacagcctggggggtccctgagactctcctgtgcagcctctggattcacctttagcatctatgtcatgagctgggtccgccaggctccagggaaggggctggagtgggtctcagctattagtgctagtggtgataacacatactacgcagactccgtgaagggccggttcaccatctccagagacaattccaagaacacgctgtatctgcaaatgaacagcctgagagccgaggacacggccgtatattactgtgcgaaaacccctacttactggggccagggcaccctggtcaccgtctcctcagatgagatttgatagaaacctcattgagaccccgctgatgaccccatgagaccacatagagaccctacagagacccagagaggtcagagcctgcctggaggaggtgcagctgttggagtctgggggaggcttggtacagcctggggggtccctgagactctcctgtgcagcctctggattcacctttagcagctttttcatgaactgggtccgccaggctccagggaaggggctggagtgggtctcaactattagtgccagtgatggtaggacacactacgcagactccgtgaagggccggttcaccatctccagagacaattccaagaacacgctgtatctgcaaatgaacagcctgagagccgaggacacggccgtatattactgtgcgaaagatctccactggtacggtatggacgcctggggccagggcaccctggtcaccgtctcctcatgggctctgtcaccgtcatcagcaccactgccatagcctgagatgtcatagagagccatagagacaccactgaaaccccataaaggccctgtagggacccgaggtgcagctgttggagtctgggggaggcttggtacagcctggggggtccctgagactctcctgtgcagcctctggattcacctttagcagctttgacatgagctgggtccgccaggctccagggaaggggctggagtgggtctcaagtattagtggtagtggtattagaacatattacgcagactccgtgaagggccggttcaccatctccagagacaattccaagaacacgctgtatctgcaaatgaacagcctgagagccgaggacacggccgtatattactgtgcgaaagatggggtgtatagcagtggccagtactaccattacggtatggacgtctggggccagggcaccctggtcaccgtctcctcacgccatcagccctgtggggaaggacagagagcgctgacggagccgccgccacacaacctcgtggagctgggcctcataaaacccccagagacccccagaggaggtgcagctgttggagtctgggggaggcttggtacagcctggggggtccctgagactctcctgtgcagcctctggattcacctttagcacctttgtcatgacgtgggtccgccaggctccagggaaggggctggagtgggtctcagctattactggtagtgggggtgacacatactacgcagactccgtgaagggccggttcaccatctccagagacaattccaagaacacgctgtatctgcaaatgaacagcctgagagccgaggacacggccgtatattactgtgcgaaagatctccacgtagaagatgttttggctggagaagatgttttggctgggggtctggacgtctggggccagggcaccctggtcaccgtctcctcagcggggttcggacacgaccgaaaggactcgtggtttcctgccccgaaatagctctgatgtggggacagctggaggtgttctgcagctgggctgtggtcgcgaggtgcagctgttggagtctgggggaggcttggtacagcctggggggtccctgagactctcctgtgcagcctctggattcacctttagcaagtaccttatgaggtgggtccgccaggctccagggaaggggctggagtgggtctcaagtattagtgacagtggtgaaggcccaacctattcagactccgtgaagggccggttcaccatctccagagacaattccaagaacacgctgtatctgcaaatgaacagcctgagagccgaggacacggccgtatattactgtgcgaaatgcgatggttcggggcgtgactgcggtatggacgtctggggccagggcaccctggtcaccgtctcctcagagcacgaaaataggatggaaaggggagaaaaaaataaaacatcgactgaaaggggccaaagagagcatcggccgcagctgctccatctgctggcacggcgaggtgcagctgttggagtctgggggaggcttggtacagcctggggggtccctgagactctcctgtgcagcctctggattcacctttagcaactatgccatgacctgggtccgccaggctccagggaaggggctggagtgggtctcagctattagtaattatggtggtagcacatactactcagactccgtgaagggccggttcaccatctccagagacaattccaagaacacgctgtatctgcaaatgaacagcctgagagccgaggacacggccgtatattactgtgcgaaatactttgacttctggggccagggcaccctggtcaccgtctcctcaggggtctgcacgtctcagaagaggcacaacccgctccacagctcgctgcaggggtggtggcatcccctgctgaccccacgcagctgcactggctgcgaaagaggtgcagctgttggagtctgggggaggcttggtacagcctggggggtccctgagactctcctgtgcagcctctggattcacctttagcacctatgtcatgggctgggtccgccaggctccagggaaggggctggagtgggtctcaggtattagtggtcgtggtggtagcacatactacgcagactccgtgaagggccggttcaccatctccagagacaattccaagaacacgctgtatctgcaaatgaacagcctgagagccgaggacacggccgtatattactgtgcgaaagacaactcttacgatttttggagaggttactactactactacggtatggacgtctggggccagggcaccctggtcaccgtctcctcaggtctctcttatgaaccgggcctgaagaccacccataggacgcacatgctgtgatggtcacgtgtaggaatgctgccccgcaccaacagggtgtccttatgaggtgcagctgttggagtctgggggaggcttggtacagcctggggggtccctgagactctcctgtgcagcctctggattcacctttagcagctattccatgagctgggtccgccaggctccagggaaggggctggagtgggtctcagctattagtggcactggtggtgccatatactacgcagactccgtgaagggccggttcaccatctccagagacaattccaagaacacgctgtatctgcaaatgaacagcctgagagccgaggacacggccgtatattactgtgcgaaagggggtctcaccaaatattgtagtggtgattactgtcactattggggccagggcaccctggtcaccgtctcctcatctaaatggtctttacgtggtttcagtcacatctctatggctctctatgacatctcagtggggtctctttgtggtcggagtgtggtccggctccgcgagggaggtgcagctgttggagtctgggggaggcttggtacagcctggggggtccctgagactctcctgtgcagcctctggattcacctttagcaactttgccatgacctgggtccgccaggctccagggaaggggctggagtgggtctcaactgttactagtagtggtgctggcacatactacgcagactccgtgaagggccggttcaccatctccagagacaattccaagaacacgctgtatctgcaaatgaacagcctgagagccgaggacacggccgtatattactgtgcgaaatctcttggcagcagccttgactactggggccagggcaccctggtcaccgtctcctcactctatgagatctcagtgatgtctcgaagggaattcaacgcaatctatatgagatctcttcggagtcgcaatgaggtctctattagaactctatggggtcgaggtgcagctgttggagtctgggggaggcttggtacagcctggggggtccctgagactctcctgtgcagcctctggattcacctttagcaactttgacctcagctgggtccgccaggctccagggaaggggctggagtgggtctcagctattcgtggtagcggtagtagcgctttctacgcagactccgtgcagggccggttcaccatctccagagacaattccaagaacacgctgtatctgcaaatgaacagcctgagagccgaggacacggccgtatattactgtgcgaaattatcctggcattactctggttgggggaatccttggggccagggcaccctggtcaccgtctcctcaggtgggcttcggccctttccggggtctttagggcatctacggggtctcactgtgttctcagtggggtctctatgaggtgttgactgaacctcatcgggatgaggtgcagctgttggagtctgggggaggcttggtacagcctggggggtccctgagactctcctgtgcagcctctggattcacctttagcaactttggcatggactgggtccgccaggctccagggaaggggctggagtgggtctcaactattactgtcagtggtgaaaacacatattacgcagactccgtgaagggccggttcaccatctccagagacaattccaagaacacgctgtatctgcaaatgaacagcctgagagccgaggacacggccgtatattactgtgcgaaaggctttagcagtggctggtcatttgactactggggccagggcaccctggtcaccgtctcctcagctctcctaagaacagaacaagccctgatctccttccccccgtgatttcgccaccatcagccctcatagctcccatctgctcctcttggctgccccgccagaggtgcagctgttggagtctgggggaggcttggtacagcctggggggtccctgagactctcctgtgcagcctctggattcacctttagcagttatgccctgagctgggtccgccaggctccagggaaggggctggagtgggtctcacttgttagtggtagtgctattagtacatactacgcagactccgtgaagggccggttcaccatctccagagacaattccaagaacacgctgtatctgcaaatgaacagcctgagagccgaggacacggccgtatattactgtgcgaaaggggctcgagcccacctctactacgatatggacgtctggggccagggcaccctggtcaccgtctcctcagctgagagaggggatgggctccgtgcccacattggggctcagctccacgctgctgctgtatggagccgtgcgatgtggggctgtgctgggcacggacacggaggtgcagctgttggagtctgggggaggcttggtacagcctggggggtccctgagactctcctgtgcagcctctggattcacctttagcacctttttcatgagctgggtccgccaggctccagggaaggggctggagtgggtctcaactaatactggtgatggtggtagtacatactactcagactccgtgaagggccggttcaccatctccagagacaattccaagaacacgctgtatctgcaaatgaacagcctgagagccgaggacacggccgtatattactgtgcgaaaactactatggttcggggagttatgcttgactactggggccagggcaccctggtcaccgtctcctcaatgcagagctgtgtgctgggacgaagaagtggagctgtgcgtggaagcacacaacggctgagttctgaagagaccctctgtcctctcgtccccccgctgtgaggtgcagctgttggagtctgggggaggcttggtacagcctggggggtccctgagactctcctgtgcagcctctggattcacctttagcagatatgccatgggctgggtccgccaggctccagggaaggggctggagtgggtctcaagtatgagtgctagtgctggcagcacatactacgcagactccgtgaggggccggttcaccatctccagagacaattccaagaacacgctgtatctgcaaatgaacagcctgagagccgaggacacggccgtatattactgtgcgaaagatctggttcacgcggatatagtggccctggggtgtggccctgactactggggccagggcaccctggtcaccgtctcctcagaccccattgatgtcccattgataccccagacggactccactgaagctcaagcgaggccggggcgcccctggaggggcagccaagatctccttccctcccgaggtgcagctgttggagtctgggggaggcttggtacagcctggggggtccctgagactctcctgtgcagcctctggattcacctttagcaactttgccataagctgggtccgccaggctccagggaaggggctggagtgggtctcaggtatcagtggtactggtggtaggacatactacgcagactccgtgaagggccggttcaccatctccagagacaattccaagaacacgctgtatctgcaaatgaacagcctgagagccgaggacacggccgtatattactgtgcgaaaggggtcgatgctacatatagtgccacctggtacgtggggggctactatgagtattggggccagggcaccctggtcaccgtctcctcaacaccctttacttacatcggtcagatctaataaagaccacattcagatcccatgcaaagcgcattgatgcccctcagagaccccacagagtcccctcagaatcgat

SEQ ID NO: 163 - DNA, 10804 bp, Artificial Sequence
  Synthetic DNA
tcgcgcgtttcggtgatgacggtgaaaacctctgacacatgcagctcccggagacggtcacagcttgtctgtaagcggatgccgggagcagacaagcccgtcagggcgcgtcagcgggtgttggcgggtgtcggggctggcttaactatgcggcatcagagcagattgtactgagagtgcaccatatgcggtgtgaaataccgcacagatgcgtaaggagaaaataccgcatcaggcgccattcgccattcaggctgcgcaactgttgggaagggcgatcggtgcgggcctcttcgctattacgccagctggcgaaagggggatgtgctgcaaggcgattaagttgggtaacgccagggttttcccagtcacgacgttgtaaaacgacggccagtgaattgacgcgtattgggatggaaccatatgtagcttacgacactgataacttcgtatatggtattatatacgaagttataagcttcaccatggccaagcctttgtctcaagaagaatccaccctcattgaaagagcaacggctacaatcaacagcatccccatctctgaagactacagcgtcgccagcgcagctctctctagcgacggccgcatcttcactggtgtcaatgtatatcattttactgggggaccttgtgcagaactcgtggtgctgggcactgctgctgctgcggcagctggcaacctgacttgtatcgtcgcgatcggaaatgagaacaggggcatcttgagcccctgcggacggtgtcgacaggtgcttctcgatctgcatcctgggatcaaagcgatagtgaaggacagtgatggacagccgacggcagttgggattcgtgaattgctgccctctggttatgtgtgggagggctaaactagtgcacttcgtggccgaggagcaggactgacacgtgctacgagatttcgattccaccgccgccttctatgaaaggttgggcttcggaatcgttttccgggacgccggctggatgatcctccagcgcggggatctcatgctggagttcttcgcccaccccaacttgtttattgcagcttataatggttacaaataaagcaatagcatcacaaatttcacaaataaagcatttttttcactgcattctagttgtggtttgtccaaactcatcaatgtatcttatcatgtctgtataccgtcgacctctagctagagcttggcgtaatcatggtcatagctgtttcctgtgtgcccaccccaacttgtttattgcagcttataatggttacaaataaagcaatagcatcacaaatttcacaaataaagcatttttttcactgcattctagttgtggtttgtccaaactcatcaatgtatcttatcatgtctgataacttcgtatattctatcttatacgaacggtactcgagagctcatgcggtaccgctagcatgctggccaggatccatgcccatggccgcggggcgcgccgaggtgcagctgttggagtctgggggaggcttggtacagcctggggggtccctgagactctcctgtgcagcctctggattcacctttagcatctatgtcatgagctgggtccgccaggctccagggaaggggctggagtgggtctcagctattagtgctagtggtgataacacatactacgcagactccgtgaagggccggttcaccatctccagagacaattccaagaacacgctgtatctgcaaatgaacagcctgagagccgaggacacggccgtatattactgtgcgaaaacccctacttactggggccagggcaccctggtcaccgtctcctcagatgagatttgatagaaacctcattgagaccccgctgatgaccccatgagaccacatagagaccctacagagacccagagaggtcagagcctgcctggaggaggtgcagctgttggagtctgggggaggcttggtacagcctggggggtccctgagactctcctgtgcagcctctggattcacctttagcagctttttcatgaactgggtccgccaggctccagggaaggggctggagtgggtctcaactattagtgccagtgatggtaggacacactacgcagactccgtgaagggccggttcaccatctccagagacaattccaagaacacgctgtatctgcaaatgaacagcctgagagccgaggacacggccgtatattactgtgcgaaagatctccactggtacggtatggacgcctggggccagggcaccctggtcaccgtctcctcatgggctctgtcaccgtcatcagcaccactgccatagcctgagatgtcatagagagccatagagacaccactgaaaccccataaaggccctgtagggacccgaggtgcagctgttggagtctgggggaggcttggtacagcctggggggtccctgagactctcctgtgcagcctctggattcacctttagcagctttgacatgagctgggtccgccaggctccagggaaggggctggagtgggtctcaagtattagtggtagtggtattagaacatattacgcagactccgtgaagggccggttcaccatctccagagacaattccaagaacacgctgtatctgcaaatgaacagcctgagagccgaggacacggccgtatattactgtgcgaaagatggggtgtatagcagtggccagtactaccattacggtatggacgtctggggccagggcaccctggtcaccgtctcctcacgccatcagccctgtggggaaggacagagagcgctgacggagccgccgccacacaacctcgtggagctgggcctcataaaacccccagagacccccagaggaggtgcagctgttggagtctgggggaggcttggtacagcctggggggtccctgagactctcctgtgcagcctctggattcacctttagcacctttgtcatgacgtgggtccgccaggctccagggaaggggctggagtgggtctcagctattactggtagtgggggtgacacatactacgcagactccgtgaagggccggttcaccatctccagagacaattccaagaacacgctgtatctgcaaatgaacagcctgagagccgaggacacggccgtatattactgtgcgaaagatctccacgtagaagatgttttggctggagaagatgttttggctgggggtctggacgtctggggccagggcaccctggtcaccgtctcctcagcggggttcggacacgaccgaaaggactcgtggtttcctgccccgaaatagctctgatgtggggacagctggaggtgttctgcagctgggctgtggtcgcgaggtgcagctgttggagtctgggggaggcttggtacagcctggggggtccctgagactctcctgtgcagcctctggattcacctttagcaagtaccttatgaggtgggtccgccaggctccagggaaggggctggagtgggtctcaagtattagtgacagtggtgaaggcccaacctattcagactccgtgaagggccggttcaccatctccagagacaattccaagaacacgctgtatctgcaaatgaacagcctgagagccgaggacacggccgtatattactgtgcgaaatgcgatggttcggggcgtgactgcggtatggacgtctggggccagggcaccctggtcaccgtctcctcagagcacgaaaataggatggaaaggggagaaaaaaataaaacatcgactgaaaggggccaaagagagcatcggccgcagctgctccatctgctggcacggcgaggtgcagctgttggagtctgggggaggcttggtacagcctggggggtccctgagactctcctgtgcagcctctggattcacctttagcaactatgccatgacctgggtccgccaggctccagggaaggggctggagtgggtctcagctattagtaattatggtggtagcacatactactcagactccgtgaagggccggttcaccatctccagagacaattccaagaacacgctgtatctgcaaatgaacagcctgagagccgaggacacggccgtatattactgtgcgaaatactttgacttctggggccagggcaccctggtcaccgtctcctcaggggtctgcacgtctcagaagaggcacaacccgctccacagctcgctgcaggggtggtggcatcccctgctgaccccacgcagctgcactggctgcgaaagaggtgcagctgttggagtctgggggaggcttggtacagcctggggggtccctgagactctcctgtgcagcctctggattcacctttagcacctatgtcatgggctgggtccgccaggctccagggaaggggctggagtgggtctcaggtattagtggtcgtggtggtagcacatactacgcagactccgtgaagggccggttcaccatctccagagacaattccaagaacacgctgtatctgcaaatgaacagcctgagagccgaggacacggccgtatattactgtgcgaaagacaactcttacgatttttggagaggttactactactactacggtatggacgtctggggccagggcaccctggtcaccgtctcctcaggtctctcttatgaaccgggcctgaagaccacccataggacgcacatgctgtgatggtcacgtgtaggaatgctgccccgcaccaacagggtgtccttatgaggtgcagctgttggagtctgggggaggcttggtacagcctggggggtccctgagactctcctgtgcagcctctggattcacctttagcagctattccatgagctgggtccgccaggctccagggaaggggctggagtgggtctcagctattagtggcactggtggtgccatatactacgcagactccgtgaagggccggttcaccatctccagagacaattccaagaacacgctgtatctgcaaatgaacagcctgagagccgaggacacggccgtatattactgtgcgaaagggggtctcaccaaatattgtagtggtgattactgtcactattggggccagggcaccctggtcaccgtctcctcatctaaatggtctttacgtggtttcagtcacatctctatggctctctatgacatctcagtggggtctctttgtggtcggagtgtggtccggctccgcgagggaggtgcagctgttggagtctgggggaggcttggtacagcctggggggtccctgagactctcctgtgcagcctctggattcacctttagcaactttgccatgacctgggtccgccaggctccagggaaggggctggagtgggtctcaactgttactagtagtggtgctggcacatactacgcagactccgtgaagggccggttcaccatctccagagacaattccaagaacacgctgtatctgcaaatgaacagcctgagagccgaggacacggccgtatattactgtgcgaaatctcttggcagcagccttgactactggggccagggcaccctggtcaccgtctcctcactctatgagatctcagtgatgtctcgaagggaattcaacgcaatctatatgagatctcttcggagtcgcaatgaggtctctattagaactctatggggtcgaggtgcagctgttggagtctgggggaggcttggtacagcctggggggtccctgagactctcctgtgcagcctctggattcacctttagcaactttgacctcagctgggtccgccaggctccagggaaggggctggagtgggtctcagctattcgtggtagcggtagtagcgctttctacgcagactccgtgcagggccggttcaccatctccagagacaattccaagaacacgctgtatctgcaaatgaacagcctgagagccgaggacacggccgtatattactgtgcgaaattatcctggcattactctggttgggggaatccttggggccagggcaccctggtcaccgtctcctcaggtgggcttcggccctttccggggtctttagggcatctacggggtctcactgtgttctcagtggggtctctatgaggtgttgactgaacctcatcgggatgaggtgcagctgttggagtctgggggaggcttggtacagcctggggggtccctgagactctcctgtgcagcctctggattcacctttagcaactttggcatggactgggtccgccaggctccagggaaggggctggagtgggtctcaactattactgtcagtggtgaaaacacatattacgcagactccgtgaagggccggttcaccatctccagagacaattccaagaacacgctgtatctgcaaatgaacagcctgagagccgaggacacggccgtatattactgtgcgaaaggctttagcagtggctggtcatttgactactggggccagggcaccctggtcaccgtctcctcagctctcctaagaacagaacaagccctgatctccttccccccgtgatttcgccaccatcagccctcatagctcccatctgctcctcttggctgccccgccagaggtgcagctgttggagtctgggggaggcttggtacagcctggggggtccctgagactctcctgtgcagcctctggattcacctttagcagttatgccctgagctgggtccgccaggctccagggaaggggctggagtgggtctcacttgttagtggtagtgctattagtacatactacgcagactccgtgaagggccggttcaccatctccagagacaattccaagaacacgctgtatctgcaaatgaacagcctgagagccgaggacacggccgtatattactgtgcgaaaggggctcgagcccacctctactacgatatggacgtctggggccagggcaccctggtcaccgtctcctcagctgagagaggggatgggctccgtgcccacattggggctcagctccacgctgctgctgtatggagccgtgcgatgtggggctgtgctgggcacggacacggaggtgcagctgttggagtctgggggaggcttggtacagcctggggggtccctgagactctcctgtgcagcctctggattcacctttagcacctttttcatgagctgggtccgccaggctccagggaaggggctggagtgggtctcaactaatactggtgatggtggtagtacatactactcagactccgtgaagggccggttcaccatctccagagacaattccaagaacacgctgtatctgcaaatgaacagcctgagagccgaggacacggccgtatattactgtgcgaaaactactatggttcggggagttatgcttgactactggggccagggcaccctggtcaccgtctcctcaatgcagagctgtgtgctgggacgaagaagtggagctgtgcgtggaagcacacaacggctgagttctgaagagaccctctgtcctctcgtccccccgctgtgaggtgcagctgttggagtctgggggaggcttggtacagcctggggggtccctgagactctcctgtgcagcctctggattcacctttagcagatatgccatgggctgggtccgccaggctccagggaaggggctggagtgggtctcaagtatgagtgctagtgctggcagcacatactacgcagactccgtgaggggccggttcaccatctccagagacaattccaagaacacgctgtatctgcaaatgaacagcctgagagccgaggacacggccgtatattactgtgcgaaagatctggttcacgcggatatagtggccctggggtgtggccctgactactggggccagggcaccctggtcaccgtctcctcagaccccattgatgtcccattgataccccagacggactccactgaagctcaagcgaggccggggcgcccctggaggggcagccaagatctccttccctcccgaggtgcagctgttggagtctgggggaggcttggtacagcctggggggtccctgagactctcctgtgcagcctctggattcacctttagcaactttgccataagctgggtccgccaggctccagggaaggggctggagtgggtctcaggtatcagtggtactggtggtaggacatactacgcagactccgtgaagggccggttcaccatctccagagacaattccaagaacacgctgtatctgcaaatgaacagcctgagagccgaggacacggccgtatattactgtgcgaaaggggtcgatgctacatatagtgccacctggtacgtggggggctactatgagtattggggccagggcaccctggtcaccgtctcctcaacaccctttacttacatcggtcagatctaataaagaccacattcagatcccatgcaaagcgcattgatgcccctcagagaccccacagagtcccctcagaatcgatatgcatttaaatgggccccccggtgatatccccgggtctagagcggccgctaccgttcgtataatgtatgctatacgaagttatatcgaattcctgcagagatctgttccatcccaatggcgcgccgagcttggcgtaatcatggtcatagctgtttcctgtgtgaaattgttatccgctcacaattccacacaacatacgagccggaagcataaagtgtaaagcctggggtgcctaatgagtgagctaactcacattaattgcgttgcgctcactgcccgctttccagtcgggaaacctgtcgtgccagctgcattaatgaatcggccaacgcgcggggagaggcggtttgcgtattgggcgctcttccgcttcctcgctcactgactcgctgcgctcggtcgttcggctgcggcgagcggtatcagctcactcaaaggcggtaatacggttatccacagaatcaggggataacgcaggaaagaacatgtgagcaaaaggccagcaaaaggccaggaaccgtaaaaaggccgcgttgctggcgtttttccataggctccgcccccctgacgagcatcacaaaaatcgacgctcaagtcagaggtggcgaaacccgacaggactataaagataccaggcgtttccccctggaagctccctcgtgcgctctcctgttccgaccctgccgcttaccggatacctgtccgcctttctcccttcgggaagcgtggcgctttctcatagctcacgctgtaggtatctcagttcggtgtaggtcgttcgctccaagctgggctgtgtgcacgaaccccccgttcagcccgaccgctgcgccttatccggtaactatcgtcttgagtccaacccggtaagacacgacttatcgccactggcagcagccactggtaacaggattagcagagcgaggtatgtaggcggtgctacagagttcttgaagtggtggcctaactacggctacactagaagaacagtatttggtatctgcgctctgctgaagccagttaccttcggaaaaagagttggtagctcttgatccggcaaacaaaccaccgctggtagcggtggtttttttgtttgcaagcagcagattacgcgcagaaaaaaaggatctcaagaagatcctttgatcttttctacggggtctgacgctcagtggaacgaaaactcacgttaagggattttggtcatgagattatcaaaaaggatcttcacctagatccttttaaattaaaaatgaagttttaaatcaatctaaagtatatatgagtaaacttggtctgacagttaccaatgcttaatcagtgaggcacctatctcagcgatctgtctatttcgttcatccatagttgcctgactccccgtcgtgtagataactacgatacgggagggcttaccatctggccccagtgctgcaatgataccgcgagacccacgctcaccggctccagatttatcagcaataaaccagccagccggaagggccgagcgcagaagtggtcctgcaactttatccgcctccatccagtctattaattgttgccgggaagctagagtaagtagttcgccagttaatagtttgcgcaacgttgttgccattgctacaggcatcgtggtgtcacgctcgtcgtttggtatggcttcattcagctccggttcccaacgatcaaggcgagttacatgatcccccatgttgtgcaaaaaagcggttagctccttcggtcctccgatcgttgtcagaagtaagttggccgcagtgttatcactcatggttatggcagcactgcataattctcttactgtcatgccatccgtaagatgcttttctgtgactggtgagtactcaaccaagtcattctgagaatagtgtatgcggcgaccgagttgctcttgcccggcgtcaatacgggataataccgcgccacatagcagaactttaaaagtgctcatcattggaaaacgttcttcggggcgaaaactctcaaggatcttaccgctgttgagatccagttcgatgtaacccactcgtgcacccaactgatcttcagcatcttttactttcaccagcgtttctgggtgagcaaaaacaggaaggcaaaatgccgcaaaaaagggaataagggcgacacggaaatgttgaatactcatactcttcctttttcaatattattgaagcatttatcagggttattgtctcatgagcggatacatatttgaatgtatttagaaaaataaacaaataggggttccgcgcacatttccccgaaaagtgccacctgacgtctaagaaaccattattatcatgacattaacctataaaaataggcgtatcacgaggccctttcgtc

SEQ ID NO: 164 - DNA, 10827 bp, Artificial Sequence
  Synthetic DNA
tcgcgcgtttcggtgatgacggtgaaaacctctgacacatgcagctcccggagacggtcacagcttgtctgtaagcggatgccgggagcagacaagcccgtcagggcgcgtcagcgggtgttggcgggtgtcggggctggcttaactatgcggcatcagagcagattgtactgagagtgcaccatatgcggtgtgaaataccgcacagatgcgtaaggagaaaataccgcatcaggcgccattcgccattcaggctgcgcaactgttgggaagggcgatcggtgcgggcctcttcgctattacgccagctggcgaaagggggatgtgctgcaaggcgattaagttgggtaacgccagggttttcccagtcacgacgttgtaaaacgacggccagtgaattgacgcgtattgggatggaaccatatgtagcttacgacactgataacttcgtatatggtattatatacgaagttataagcttcaccatggccaagcctttgtctcaagaagaatccaccctcattgaaagagcaacggctacaatcaacagcatccccatctctgaagactacagcgtcgccagcgcagctctctctagcgacggccgcatcttcactggtgtcaatgtatatcattttactgggggaccttgtgcagaactcgtggtgctgggcactgctgctgctgcggcagctggcaacctgacttgtatcgtcgcgatcggaaatgagaacaggggcatcttgagcccctgcggacggtgtcgacaggtgcttctcgatctgcatcctgggatcaaagcgatagtgaaggacagtgatggacagccgacggcagttgggattcgtgaattgctgccctctggttatgtgtgggagggctaaactagtgcacttcgtggccgaggagcaggactgacacgtgctacgagatttcgattccaccgccgccttctatgaaaggttgggcttcggaatcgttttccgggacgccggctggatgatcctccagcgcggggatctcatgctggagttcttcgcccaccccaacttgtttattgcagcttataatggttacaaataaagcaatagcatcacaaatttcacaaataaagcatttttttcactgcattctagttgtggtttgtccaaactcatcaatgtatcttatcatgtctgtataccgtcgacctctagctagagcttggcgtaatcatggtcatagctgtttcctgtgtgcccaccccaacttgtttattgcagcttataatggttacaaataaagcaatagcatcacaaatttcacaaataaagcatttttttcactgcattctagttgtggtttgtccaaactcatcaatgtatcttatcatgtctgataacttcgtatattctatcttatacgaacggtactcgagagctcatgcggtaccgctagcatgctggccaggatccatgcccatggccgcggatgcggcgcgccatcgattctgaggggactctgtggggtctctgaggggcatcaatgcgctttgcatgggatctgaatgtggtctttattagatctgaccgatgtaagtaaagggtgttgaggagacggtgaccagggtgccctggccccaatactcatagtagccccccacgtaccaggtggcactatatgtagcatcgacccctttcgcacagtaatatacggccgtgtcctcggctctcaggctgttcatttgcagatacagcgtgttcttggaattgtctctggagatggtgaaccggcccttcacggagtctgcgtagtatgtcctaccaccagtaccactgatacctgagacccactccagccccttccctggagcctggcggacccagcttatggcaaagttgctaaaggtgaatccagaggctgcacaggagagtctcagggaccccccaggctgtaccaagcctcccccagactccaacagctgcacctcgggagggaaggagatcttggctgcccctccaggggcgccccggcctcgcttgagcttcagtggagtccgtctggggtatcaatgggacatcaatggggtctgaggagacggtgaccagggtgccctggccccagtagtcagggccacaccccagggccactatatccgcgtgaaccagatctttcgcacagtaatatacggccgtgtcctcggctctcaggctgttcatttgcagatacagcgtgttcttggaattgtctctggagatggtgaaccggcccctcacggagtctgcgtagtatgtgctgccagcactagcactcatacttgagacccactccagccccttccctggagcctggcggacccagcccatggcatatctgctaaaggtgaatccagaggctgcacaggagagtctcagggaccccccaggctgtaccaagcctcccccagactccaacagctgcacctcacagcggggggacgagaggacagagggtctcttcagaactcagccgttgtgtgcttccacgcacagctccacttcttcgtcccagcacacagctctgcattgaggagacggtgaccagggtgccctggccccagtagtcaagcataactccccgaaccatagtagttttcgcacagtaatatacggccgtgtcctcggctctcaggctgttcatttgcagatacagcgtgttcttggaattgtctctggagatggtgaaccggcccttcacggagtctgagtagtatgtactaccaccatcaccagtattagttgagacccactccagccccttccctggagcctggcggacccagctcatgaaaaaggtgctaaaggtgaatccagaggctgcacaggagagtctcagggaccccccaggctgtaccaagcctcccccagactccaacagctgcacctccgtgtccgtgcccagcacagccccacatcgcacggctccatacagcagcagcgtggagctgagccccaatgtgggcacggagcccatcccctctctcagctgaggagacggtgaccagggtgccctggccccagacgtccatatcgtagtagaggtgggctcgagcccctttcgcacagtaatatacggccgtgtcctcggctctcaggctgttcatttgcagatacagcgtgttcttggaattgtctctggagatggtgaaccggcccttcacggagtctgcgtagtatgtactaatagcactaccactaacaagtgagacccactccagccccttccctggagcctggcggacccagctcagggcataactgctaaaggtgaatccagaggctgcacaggagagtctcagggaccccccaggctgtaccaagcctcccccagactccaacagctgcacctctggcggggcagccaagaggagcagatgggagctatgagggctgatggtggcgaaatcacggggggaaggagatcagggcttgttctgttcttaggagagctgaggagacggtgaccagggtgccctggccccagtagtcaaatgaccagccactgctaaagcctttcgcacagtaatatacggccgtgtcctcggctctcaggctgttcatttgcagatacagcgtgttcttggaattgtctctggagatggtgaaccggcccttcacggagtctgcgtaatatgtgttttcaccactgacagtaatagttgagacccactccagccccttccctggagcctggcggacccagtccatgccaaagttgctaaaggtgaatccagaggctgcacaggagagtctcagggaccccccaggctgtaccaagcctcccccagactccaacagctgcacctcatcccgatgaggttcagtcaacacctcatagagaccccactgagaacacagtgagaccccgtagatgccctaaagaccccggaaagggccgaagcccacctgaggagacggtgaccagggtgccctggccccaaggattcccccaaccagagtaatgccaggataatttcgcacagtaatatacggccgtgtcctcggctctcaggctgttcatttgcagatacagcgtgttcttggaattgtctctggagatggtgaaccggccctgcacggagtctgcgtagaaagcgctactaccgctaccacgaatagctgagacccactccagccccttccctggagcctggcggacccagctgaggtcaaagttgctaaaggtgaatccagaggctgcacaggagagtctcagggaccccccaggctgtaccaagcctcccccagactccaacagctgcacctcgaccccatagagttctaatagagacctcattgcgactccgaagagatctcatatagattgcgttgaattcccttcgagacatcactgagatctcatagagtgaggagacggtgaccagggtgccctggccccagtagtcaaggctgctgccaagagatttcgcacagtaatatacggccgtgtcctcggctctcaggctgttcatttgcagatacagcgtgttcttggaattgtctctggagatggtgaaccggcccttcacggagtctgcgtagtatgtgccagcaccactactagtaacagttgagacccactccagccccttccctggagcctggcggacccaggtcatggcaaagttgctaaaggtgaatccagaggctgcacaggagagtctcagggaccccccaggctgtaccaagcctcccccagactccaacagctgcacctccctcgcggagccggaccacactccgaccacaaagagaccccactgagatgtcatagagagccatagagatgtgactgaaaccacgtaaagaccatttagatgaggagacggtgaccagggtgccctggccccaatagtgacagtaatcaccactacaatatttggtgagaccccctttcgcacagtaatatacggccgtgtcctcggctctcaggctgttcatttgcagatacagcgtgttcttggaattgtctctggagatggtgaaccggcccttcacggagtctgcgtagtatatggcaccaccagtgccactaatagctgagacccactccagccccttccctggagcctggcggacccagctcatggaatagctgctaaaggtgaatccagaggctgcacaggagagtctcagggaccccccaggctgtaccaagcctcccccagactccaacagctgcacctcataaggacaccctgttggtgcggggcagcattcctacacgtgaccatcacagcatgtgcgtcctatgggtggtcttcaggcccggttcataagagagacctgaggagacggtgaccagggtgccctggccccagacgtccataccgtagtagtagtagtaacctctccaaaaatcgtaagagttgtctttcgcacagtaatatacggccgtgtcctcggctctcaggctgttcatttgcagatacagcgtgttcttggaattgtctctggagatggtgaaccggcccttcacggagtctgcgtagtatgtgctaccaccacgaccactaatacctgagacccactccagccccttccctggagcctggcggacccagcccatgacataggtgctaaaggtgaatccagaggctgcacaggagagtctcagggaccccccaggctgtaccaagcctcccccagactccaacagctgcacctctttcgcagccagtgcagctgcgtggggtcagcaggggatgccaccacccctgcagcgagctgtggagcgggttgtgcctcttctgagacgtgcagacccctgaggagacggtgaccagggtgccctggccccagaagtcaaagtatttcgcacagtaatatacggccgtgtcctcggctctcaggctgttcatttgcagatacagcgtgttcttggaattgtctctggagatggtgaaccggcccttcacggagtctgagtagtatgtgctaccaccataattactaatagctgagacccactccagccccttccctggagcctggcggacccaggtcatggcatagttgctaaaggtgaatccagaggctgcacaggagagtctcagggaccccccaggctgtaccaagcctcccccagactccaacagctgcacctcgccgtgccagcagatggagcagctgcggccgatgctctctttggcccctttcagtcgatgttttatttttttctcccctttccatcctattttcgtgctctgaggagacggtgaccagggtgccctggccccagacgtccataccgcagtcacgccccgaaccatcgcatttcgcacagtaatatacggccgtgtcctcggctctcaggctgttcatttgcagatacagcgtgttcttggaattgtctctggagatggtgaaccggcccttcacggagtctgaataggttgggccttcaccactgtcactaatacttgagacccactccagccccttccctggagcctggcggacccacctcataaggtacttgctaaaggtgaatccagaggctgcacaggagagtctcagggaccccccaggctgtaccaagcctcccccagactccaacagctgcacctcgcgaccacagcccagctgcagaacacctccagctgtccccacatcagagctatttcggggcaggaaaccacgagtcctttcggtcgtgtccgaaccccgctgaggagacggtgaccagggtgccctggccccagacgtccagacccccagccaaaacatcttctccagccaaaacatcttctacgtggagatctttcgcacagtaatatacggccgtgtcctcggctctcaggctgttcatttgcagatacagcgtgttcttggaattgtctctggagatggtgaaccggcccttcacggagtctgcgtagtatgtgtcacccccactaccagtaatagctgagacccactccagccccttccctggagcctggcggacccacgtcatgacaaaggtgctaaaggtgaatccagaggctgcacaggagagtctcagggaccccccaggctgtaccaagcctcccccagactccaacagctgcacctcctctgggggtctctgggggttttatgaggcccagctccacgaggttgtgtggcggcggctccgtcagcgctctctgtccttccccacagggctgatggcgtgaggagacggtgaccagggtgccctggccccagacgtccataccgtaatggtagtactggccactgctatacaccccatctttcgcacagtaatatacggccgtgtcctcggctctcaggctgttcatttgcagatacagcgtgttcttggaattgtctctggagatggtgaaccggcccttcacggagtctgcgtaatatgttctaataccactaccactaatacttgagacccactccagccccttccctggagcctggcggacccagctcatgtcaaagctgctaaaggtgaatccagaggctgcacaggagagtctcagggaccccccaggctgtaccaagcctcccccagactccaacagctgcacctcgggtccctacagggcctttatggggtttcagtggtgtctctatggctctctatgacatctcaggctatggcagtggtgctgatgacggtgacagagcccatgaggagacggtgaccagggtgccctggccccaggcgtccataccgtaccagtggagatctttcgcacagtaatatacggccgtgtcctcggctctcaggctgttcatttgcagatacagcgtgttcttggaattgtctctggagatggtgaaccggcccttcacggagtctgcgtagtgtgtcctaccatcactggcactaatagttgagacccactccagccccttccctggagcctggcggacccagttcatgaaaaagctgctaaaggtgaatccagaggctgcacaggagagtctcagggaccccccaggctgtaccaagcctcccccagactccaacagctgcacctcctccaggcaggctctgacctctctgggtctctgtagggtctctatgtggtctcatggggtcatcagcggggtctcaatgaggtttctatcaaatctcatctgaggagacggtgaccagggtgccctggccccagtaagtaggggttttcgcacagtaatatacggccgtgtcctcggctctcaggctgttcatttgcagatacagcgtgttcttggaattgtctctggagatggtgaaccggcccttcacggagtctgcgtagtatgtgttatcaccactagcactaatagctgagacccactccagccccttccctggagcctggcggacccagctcatgacatagatgctaaaggtgaatccagaggctgcacaggagagtctcagggaccccccaggctgtaccaagcctcccccagactccaacagctgcacctcggcgcgccccgcggatgtcgacgatttaaatgggccccccggtgatatccccgggtctagagcggccgctaccgttcgtataatgtatgctatacgaagttatatcgaattcctgcagagatctgttccatcccaatggcgcgccgagcttggcgtaatcatggtcatagctgtttcctgtgtgaaattgttatccgctcacaattccacacaacatacgagccggaagcataaagtgtaaagcctggggtgcctaatgagtgagctaactcacattaattgcgttgcgctcactgcccgctttccagtcgggaaacctgtcgtgccagctgcattaatgaatcggccaacgcgcggggagaggcggtttgcgtattgggcgctcttccgcttcctcgctcactgactcgctgcgctcggtcgttcggctgcggcgagcggtatcagctcactcaaaggcggtaatacggttatccacagaatcaggggataacgcaggaaagaacatgtgagcaaaaggccagcaaaaggccaggaaccgtaaaaaggccgcgttgctggcgtttttccataggctccgcccccctgacgagcatcacaaaaatcgacgctcaagtcagaggtggcgaaacccgacaggactataaagataccaggcgtttccccctggaagctccctcgtgcgctctcctgttccgaccctgccgcttaccggatacctgtccgcctttctcccttcgggaagcgtggcgctttctcatagctcacgctgtaggtatctcagttcggtgtaggtcgttcgctccaagctgggctgtgtgcacgaaccccccgttcagcccgaccgctgcgccttatccggtaactatcgtcttgagtccaacccggtaagacacgacttatcgccactggcagcagccactggtaacaggattagcagagcgaggtatgtaggcggtgctacagagttcttgaagtggtggcctaactacggctacactagaagaacagtatttggtatctgcgctctgctgaagccagttaccttcggaaaaagagttggtagctcttgatccggcaaacaaaccaccgctggtagcggtggtttttttgtttgcaagcagcagattacgcgcagaaaaaaaggatctcaagaagatcctttgatcttttctacggggtctgacgctcagtggaacgaaaactcacgttaagggattttggtcatgagattatcaaaaaggatcttcacctagatccttttaaattaaaaatgaagttttaaatcaatctaaagtatatatgagtaaacttggtctgacagttaccaatgcttaatcagtgaggcacctatctcagcgatctgtctatttcgttcatccatagttgcctgactccccgtcgtgtagataactacgatacgggagggcttaccatctggccccagtgctgcaatgataccgcgagacccacgctcaccggctccagatttatcagcaataaaccagccagccggaagggccgagcgcagaagtggtcctgcaactttatccgcctccatccagtctattaattgttgccgggaagctagagtaagtagttcgccagttaatagtttgcgcaacgttgttgccattgctacaggcatcgtggtgtcacgctcgtcgtttggtatggcttcattcagctccggttcccaacgatcaaggcgagttacatgatcccccatgttgtgcaaaaaagcggttagctccttcggtcctccgatcgttgtcagaagtaagttggccgcagtgttatcactcatggttatggcagcactgcataattctcttactgtcatgccatccgtaagatgcttttctgtgactggtgagtactcaaccaagtcattctgagaatagtgtatgcggcgaccgagttgctcttgcccggcgtcaatacgggataataccgcgccacatagcagaactttaaaagtgctcatcattggaaaacgttcttcggggcgaaaactctcaaggatcttaccgctgttgagatccagttcgatgtaacccactcgtgcacccaactgatcttcagcatcttttactttcaccagcgtttctgggtgagcaaaaacaggaaggcaaaatgccgcaaaaaagggaataagggcgacacggaaatgttgaatactcatactcttcctttttcaatattattgaagcatttatcagggttattgtctcatgagcggatacatatttgaatgtatttagaaaaataaacaaataggggttccgcgcacatttccccgaaaagtgccacctgacgtctaagaaaccattattatcatgacattaacctataaaaataggcgtatcacgaggccctttcgtc

SEQ ID NO: 165 - DNA, 375 bp, Artificial Sequence; identical to SEQ ID NO: 112
  Synthetic DNA

SEQ ID NO: 166 - DNA, 363 bp, Artificial Sequence
  Synthetic DNA
gaggtgcagctgttggagtctgggggaggcttggtacagcctggggggtccctgagactctcctgtgcagcctctggattcacctttagcagttttgccctgaattgggtccgccaggctccagggaaggggctggagtgggtctcaactattactggtagtgctagtaacacatactacgcagactccgtgaagggccggttcaccatctccagagacaattccaagaacacgctgtatctgcaaatgaacagcctgagagccgaggacacggccgtatattactgtgcgaaaggggcacatagtcgcagcctaacttggttcggcccctggggccagggcaccctggtcaccgtctcctca

SEQ ID NO: 167 - DNA, 372 bp, Artificial Sequence
  Synthetic DNA
gaggtgcagctgttggagtctgggggaggcttggtacagcctggggggtccctgagactctcctgtgcagcctctggattcacctttagcaactatgccatgagctgggtccgccaggctccagggaaggggctggagtgggtctcaacttttagtaagactggtgatagaacattttatgcagactccgtgaagggccggttcaccatctccagagacaattccaagaacacgctgtatctgcaaatgaacagcctgagagccgaggacacggccgtatattactgtgcgaaaaatgggccctttggttgtggtggtgactgcgcagactttgactactggggccagggcaccctggtcaccgtctcctca

SEQ ID NO: 168 - DNA, 369 bp, Artificial Sequence
  Synthetic DNA
gaggtgcagctgttggagtctgggggaggcttggtacagcctggggggtccctgagactctcctgtgcagcctctggattcacctttagcaactttcccatgagctgggtccgccaggctccagggaaggggctggagtgggtctcagttattagtggtagtggtggaagcacactctacacagactccgtgaagggccggttcaccatctccagagacaattccaagaacacgctgtatctgcaaatgaacagcctgagagccgaggacacggccgtatattactgtgcgaaagatcaggacgatttttggagtgtttcaaattggttcgacccctggggccagggcaccctggtcaccgtctcctca

SEQ ID NO: 169 - DNA, 357 bp, Artificial Sequence
  Synthetic DNA
gaggtgcagctgttggagtctgggggaggcttggtacagcctggggggtccctgagactctcctgtgcagcctctggattcacctttagcagctttgccatgacctgggtccgccaggctccagggaaggggctggagtgggtctcagctattagtggtagtgttggtagcacatactacgcagactccgtgcagggccggttcaccatctccagagacaattccaagaacacgctgtatctgcaaatgaacagcctgagagccgaggacacggccgtatattactgtgcgaaagacggtggggcctactacggaacggtcaactggggccagggcaccctggtcaccgtctcctca

SEQ ID NO: 170 - DNA, 378 bp, Artificial Sequence
  Synthetic DNA
gaggtgcagctgttggagtctgggggaggcttggtacagcctggggggtccctgagactctcctgtgcagcctctggattcacctttagcatctttgccgtgagctgggtccgccaggctccagggaaggggctggagtgggtctcagctattagtggtcatggtcttagcacatactacggagactccgtgaagggccggttcaccatctccagagacaattccaagaacacgctgtatctgcaaatgaacagcctgagagccgaggacacggccgtatattactgtgcgaaagccggaagtgctggtagcagctacccgttctactactacggtatggacgtctggggccagggcaccctggtcaccgtctcctca

SEQ ID NO: 171 - DNA, 387 bp, Artificial Sequence
  Synthetic DNA
gaggtgcagctgttggagtctgggggaggcttggtacagcctggggggtccctgagactctcctgtgcagcctctggattcacctttagcagctatgccatgatctgggtccgccaggctccagggaaggggctggagtgggtctcaggtattactgttagtggcggtagcacagactacgcagactccgtgaagggccggttcaccatctccagagacaattccaagaacacgctgtatctgcaaatgaacagcctgagagccgaggacacggccgtatattactgtgcgaaaggggggccccaacttatagcagcagctgggacttattatcactactacggtatggacgtctggggccagggcaccctggtcaccgtctcctca

SEQ ID NO: 172 - DNA, 360 bp, Artificial Sequence
  Synthetic DNA
gaggtgcagctgttggagtctgggggaggcttggtacagcctggggggtccctgagactctcctgtgcagcctctggattcacctttagcagctataccatgaactgggtccgccaggctccagggaaggggctggagtgggtctcatacattagtagtggtagtggtagcatatactacgcagactctgtgaagggccggttcaccatctccagagacaattccaagaacacgctgtatctgcaaatgaacagcctgagagccgaggacacggccgtatattactgtgcgaaacgaggtgatagtagtgcatacgcccttgactactggggccagggcaccctggtcaccgtctcctca

SEQ ID NO: 173 - DNA, 372 bp, Artificial Sequence
  Synthetic DNA
gaggtgcagctgttggagtctgggggaggcttggtacagcctggggggtccctgagactctcctgtgcagcctctggattcacctttagcagccatagcatgaactgggtccgccaggctccagggaaggggctggagtgggtctcatacattagaagtagtagtagtaccatatactacgcagactctgtgaagggtcggttcaccatctccagagacaattccaagaacacgctgtatctgcaaatgaacagcctgagagccgaggacacggccgtatattactgtgcgaaagtccccaattactatggttcatttcctcgagatggtatggacgtctggggccagggcaccctggtcaccgtctcctca

SEQ ID NO: 174 - DNA, 369 bp, Artificial Sequence
  Synthetic DNA
gaggtgcagctgttggagtctgggggaggcttggtacagcctggggggtccctgagactctcctgtgcagcctctggattcacctttagcagctataacatgaactgggtccgccaggctccagggaaggggctggagtgggtctcatacgttagtagtgattctagtaccatatactacgcagactttgtggagggccggttcaccatctccagagacaattccaagaacacgctgtatctgcaaatgaacagcctgagagccgaggacacggccgtatattactgtgcgaaaggcctggcgttctgcgccagctgctatggatacttccagctctggggccagggcaccctggtcaccgtctcctca

SEQ ID NO: 175 - DNA, 357 bp, Artificial Sequence
  Synthetic DNA
gaggtgcagctgttggagtctgggggaggcttggtacagcctggggggtccctgagactctcctgtgcagcctctggattcacctttagcagcaactccatgagctgggtccgccaggctccagggaaggggctggagtgggtctcacttatttatagcagtggtggcacatactacgcagactccgtgaagggccggttcaccatctccagagacaattccaagaacacgctgtatctgcaaatgaacagcctgagagccgaggacacggccgtatattactgtgcgaaagcgtgggtgtatgatagtagtgtttttgactattggggccagggcaccctggtcaccgtctcctca

SEQ ID NO: 176 - DNA, 360 bp, Artificial Sequence
  Synthetic DNA
gaggtgcagctgttggagtctgggggaggcttggtacagcctggggggtccctgagactctcctgtgcagcctctggattcacctttagctatgccataagctgggtccgccaggctccagggaaggggctggagtgggtctcaggtattagtggcggcggtggtagcacattctacgctgactccgtgcagggccggttcaccatctccagagacaattccaagaacacgctgtatctgcaaatgaacagcctgagagccgaggacacggccgtatattactgtgcgaaacccgagagagggatagtgggggctgcatttgactcctggggccagggcaccctggtcaccgtctcctca

SEQ ID NO: 177 - DNA, 354 bp, Artificial Sequence
  Synthetic DNA
gaggtgcagctgttggagtctgggggaggcttggtacagcctggggggtccctgagactctcctgtgcagcctctggattcacctttagcagccattggatgaggtgggtccgccaggctccagggaaggggctggagtgggtctcaaacataaagcaaggtggaagtgaagaatattatgtggactctgtgaagggccggttcaccatctccagagacaattccaagaacacgctgtatctgcaaatgaacagcctgagagccgaggacacggccgtatattactgtgcgaaaggaaattataaggcaggttgtgactactggggccagggcaccctggtcaccgtctcctca

SEQ ID NO: 178 - DNA, 348 bp, Artificial Sequence
  Synthetic DNA
gaggtgcagctgttggagtctgggggaggcttggtacagcctggggggtccctgagactctcctgtgcagcctctggattcacctttagcacctatagcatgaactgggtccgccaggctccagggaaggggctggagtgggtctcatccattactagtagtggtagttacatatactgcgcagactcagtgaagggccggttcaccatctccagagacaattccaagaacacgctgtatctgcaaatgaacagcctgagagccgaggacacggccgtatattactgtgcgaaagatggctccggtatggacgtctggggccagggcaccctggtcaccgtctcctca

SEQ ID NO: 179 - DNA, 357 bp, Artificial Sequence
  Synthetic DNA
gaggtgcagctgttggagtctgggggaggcttggtacagcctggggggtccctgagactctcctgtgcagcctctggattcacctttagctcctatagcatgacctgggtccgccaggctccagggaaggggctggagtgggtctcaaacattagcagtagtagtaataccgcattctacgcagactccgtgaagggccggttcaccatctccagagacaattccaagaacacgctgtatctgcaaatgaacagcctgagagccgaggacacggccgtatattactgtgcgaaagatcgaaatggctacaatttctttgactactggggccagggcaccctggtcaccgtctcctca

SEQ ID NO: 180 - DNA, 7155 bp, Artificial Sequence
  Synthetic DNA
ggtaccgaggtgcagctgttggagtctgggggaggcttggtacagcctggggggtccctgagactctcctgtgcagcctctggattcacctttagcagttttgccctgaattgggtccgccaggctccagggaaggggctggagtgggtctcaactattactggtagtgctagtaacacatactacgcagactccgtgaagggccggttcaccatctccagagacaattccaagaacacgctgtatctgcaaatgaacagcctgagagccgaggacacggccgtatattactgtgcgaaaggggcacatagtcgcagcctaacttggttcggcccctggggccagggcaccctggtcaccgtctcctcagtgcctggtgactcttccgcaatcagtcctgggacagaaacctcagggacagcctttatgagttttgatcacatctaacagagaggatgggccagtgagctagagtgatagagcgtgcgtgtgcggaggtgcagctgttggagtctgggggaggcttggtacagcctggggggtccctgagactctcctgtgcagcctctggattcacctttagcaactatgccatgagctgggtccgccaggctccagggaaggggctggagtgggtctcaacttttagtaagactggtgatagaacattttatgcagactccgtgaagggccggttcaccatctccagagacaattccaagaacacgctgtatctgcaaatgaacagcctgagagccgaggacacggccgtatattactgtgcgaaaaatgggccctttggttgtggtggtgactgcgcagactttgactactggggccagggcaccctggtcaccgtctcctcagtgcctggtgactcttccgcaatcagtcctgggacagaaacctcagggacagcctttatgagttttgatcacatctaacagagaggatgggccaggaggtgcagctgttggagtctgggggaggcttggtacagcctggggggtccctgagactctcctgtgcagcctctggattcacctttagcaactttcccatgagctgggtccgccaggctccagggaaggggctggagtgggtctcagttattagtggtagtggtggaagcacactctacacagactccgtgaagggccggttcaccatctccagagacaattccaagaacacgctgtatctgcaaatgaacagcctgagagccgaggacacggccgtatattactgtgcgaaagatcaggacgatttttggagtgtttcaaattggttcgacccctggggccagggcaccctggtcaccgtctcctcagtgcctggtgactcttccgcaatcagtcctgggacagaaacctcagggacagcctttatgagttttgatcacatctaacagagaggatgggccagtatagacatctatgatacgctcactcatacgaggtgcagctgttggagtctgggggaggcttggtacagcctggggggtccctgagactctcctgtgcagcctctggattcacctttagcagctttgccatgacctgggtccgccaggctccagggaaggggctggagtgggtctcagctattagtggtagtgttggtagcacatactacgcagactccgtgcagggccggttcaccatctccagagacaattccaagaacacgctgtatctgcaaatgaacagcctgagagccgaggacacggccgtatattactgtgcgaaagacggtggggcctactacggaacggtcaactggggccagggcaccctggtcaccgtctcctcagtgcctggtgactcttccgcaatcagtcctgggacagaaacctcagggacagcctttatgagttttgatcacatctaacagagaggatgggccaggaggtgcagctgttggagtctgggggaggcttggtacagcctggggggtccctgagactctcctgtgcagcctctggattcacctttagcatctttgccgtgagctgggtccgccaggctccagggaaggggctggagtgggtctcagctattagtggtcatggtcttagcacatactacggagactccgtgaagggccggttcaccatctccagagacaattccaagaacacgctgtatctgcaaatgaacagcctgagagccgaggacacggccgtatattactgtgcgaaagccggaagtgctggtagcagctacccgttctactactacggtatggacgtctggggccagggcaccctggtcaccgtctcctcagtgcctggtgactcttccgcaatcagtcctgggacagaaacctcagggacagcctttatgagttttgatcacatctaacagagaggatgggccagtcatcgagtctcgagctctctcgcagacacgaggtgcagctgttggagtctgggggaggcttggtacagcctggggggtccctgagactctcctgtgcagcctctggattcacctttagcagctatgccatgatctgggtccgccaggctccagggaaggggctggagtgggtctcaggtattactgttagtggcggtagcacagactacgcagactccgtgaagggccggttcaccatctccagagacaattccaagaacacgctgtatctgcaaatgaacagcctgagagccgaggacacggccgtatattactgtgcgaaaggggggccccaacttatagcagcagctgggacttattatcactactacggtatggacgtctggggccagggcaccctggtcaccgtctcctcagtgcctggtgactcttccgcaatcagtcctgggacagaaacctcagggacagcctttatgagttttgatcacatctaacagagaggatgggccaggaggtgcagctgttggagtctgggggaggcttggtacagcctggggggtccctgagactctcctgtgcagcctctggattcacctttagcagctataccatgaactgggtccgccaggctccagggaaggggctggagtgggtctcatacattagtagtggtagtggtagcatatactacgcagactctgtgaagggccggttcaccatctccagagacaattccaagaacacgctgtatctgcaaatgaacagcctgagagccgaggacacggccgtatattactgtgcgaaacgaggtgatagtagtgcatacgcccttgactactggggccagggcaccctggtcaccgtctcctcagtgcctggtgactcttccgcaatcagtcctgggacagaaacctcagggacagcctttatgagttttgatcacatctaacagagaggatgggccagtctgtctcgctgagtgacgctgatgtgtacgaggtgcagctgttggagtctgggggaggcttggtacagcctggggggtccctgagactctcctgtgcagcctctggattcacctttagcagccatagcatgaactgggtccgccaggctccagggaaggggctggagtgggtctcatacattagaagtagtagtagtaccatatactacgcagactctgtgaagggtcggttcaccatctccagagacaattccaagaacacgctgtatctgcaaatgaacagcctgagagccgaggacacggccgtatattactgtgcgaaagtccccaattactatggttcatttcctcgagatggtatggacgtctggggccagggcaccctggtcaccgtctcctcagtgcctggtgactcttccgcaatcagtcctgggacagaaacctcagggacagcctttatgagttttgatcacatctaacagagaggatgggccagtgctatagactgctcgctacacgtgcagcggaggtgcagctgttggagtctgggggaggcttggtacagcctggggggtccctgagactctcctgtgcagcctctggattcacctttagcagctataacatgaactgggtccgccaggctccagggaaggggctggagtgggtctcatacgttagtagtgattctagtaccatatactacgcagactttgtggagggccggttcaccatctccagagacaattccaagaacacgctgtatctgcaaatgaacagcctgagagccgaggacacggccgtatattactgtgcgaaaggcctggcgttctgcgccagctgctatggatacttccagctctggggccagggcaccctggtcaccgtctcctcagtgcctggtgactcttccgcaatcagtcctgggacagaaacctcagggacagcctttatgagttttgatcacatctaacagagaggatgggccaggaggtgcagctgttggagtctgggggaggcttggtacagcctggggggtccctgagactctcctgtgcagcctctggattcacctttagcagcaactccatgagctgggtccgccaggctccagggaaggggctggagtgggtctcacttatttatagcagtggtggcacatactacgcagactccgtgaagggccggttcaccatctccagagacaattccaagaacacgctgtatctgcaaatgaacagcctgagagccgaggacacggccgtatattactgtgcgaaagcgtgggtgtatgatagtagtgtttttgactattggggccagggcaccctggtcaccgtctcctcagtgcctggtgactcttccgcaatcagtcctgggacagaaacctcagggacagcctttatgagttttgatcacatctaacagagaggatgggccagactcacagagagactcagcgagagagtgtggaggtgcagctgttggagtctgggggaggcttggtacagcctggggggtccctgagactctcctgtgcagcctctggattcacctttagctatgccataagctgggtccgccaggctccagggaaggggctggagtgggtctcaggtattagtggcggcggtggtagcacattctacgctgactccgtgcagggccggttcaccatctccagagacaattccaagaacacgctgtatctgcaaatgaacagcctgagagccgaggacacggccgtatattactgtgcgaaacccgagagagggatagtgggggctgcatttgactcctggggccagggcaccctggtcaccgtctcctcagtgcctggtgactcttccgcaatcagtcctgggacagaaacctcagggacagcctttatgagttttgatcacatctaacagagaggatgggccaggaggtgcagctgttggagtctgggggaggcttggtacagcctggggggtccctgagactctcctgtgcagcctctggattcacctttagcagccattggatgaggtgggtccgccaggctccagggaaggggctggagtgggtctcaaacataaagcaaggtggaagtgaagaatattatgtggactctgtgaagggccggttcaccatctccagagacaattccaagaacacgctgtatctgcaaatgaacagcctgagagccgaggacacggccgtatattactgtgcgaaaggaaattataaggcaggttgtgactactggggccagggcaccctggtcaccgtctcctcagtgcctggtgactcttccgcaatcagtcctgggacagaaacctcagggacagcctttatgagttttgatcacatctaacagagaggatgggccagagctatcgcgagtctgactgagtgagctcggaggtgcagctgttggagtctgggggaggcttggtacagcctggggggtccctgagactctcctgtgcagcctctggattcacctttagcacctatagcatgaactgggtccgccaggctccagggaaggggctggagtgggtctcatccattactagtagtggtagttacatatactgcgcagactcagtgaagggccggttcaccatctccagagacaattccaagaacacgctgtatctgcaaatgaacagcctgagagccgaggacacggccgtatattactgtgcgaaagatggctccggtatggacgtctggggccagggcaccctggtcaccgtctcctcagtgcctggtgactcttccgcaatcagtcctgggacagaaacctcagggacagcctttatgagttttgatcacatctaacagagaggatgggccaggaggtgcagctgttggagtctgggggaggcttggtacagcctggggggtccctgagactctcctgtgcagcctctggattcacctttagctcctatagcatgacctgggtccgccaggctccagggaaggggctggagtgggtctcaaacattagcagtagtagtaataccgcattctacgcagactccgtgaagggccggttcaccatctccagagacaattccaagaacacgctgtatctgcaaatgaacagcctgagagccgaggacacggccgtatattactgtgcgaaagatcgaaatggctacaatttctttgactactggggccagggcaccctggtcaccgtctcctcagtgcctggtgactcttccgcaatcagtcctgggacagaaacctcagggacagcctttatgagttttgatcacatctaacagagaggatgggccagatagctctcgatcacgtgcgatcgtagcaggaggtgcagctgttggagtctgggggaggcttggtacagcctggggggtccctgagactctcctgtgcagcctctggattcacctttagcggctttgccatgaactgggtccgccaggctccagggaaggggctggagtgggtctcaactattagtaatagtgctggtagcacatattacgcagactccgtgaagggccggttcaccatctccagagacaattccaagaacacgctgtatctgcaaatgaacagcctgagagccgaggacacggccgtatattactgtgcgaaatatggggaggatattgtcgttgtgccagctcgctacggtgtggacgtctggggccagggcaccctggtcaccgtctcctcagtgcctggtgactcttccgcaatcagtcctgggacagaaacctcagggacagcctttatgagttttgatcacatctaacagagaggatgggccaggctagc

SEQ ID NO: 181 - DNA, 11374 bp, Artificial Sequence
  Synthetic DNA
tcgcgcgtttcggtgatgacggtgaaaacctctgacacatgcagctcccggagacggtcacagcttgtctgtaagcggatgccgggagcagacaagcccgtcagggcgcgtcagcgggtgttggcgggtgtcggggctggcttaactatgcggcatcagagcagattgtactgagagtgcaccatatgcggtgtgaaataccgcacagatgcgtaaggagaaaataccgcatcaggcgccattcgccattcaggctgcgcaactgttgggaagggcgatcggtgcgggcctcttcgctattacgccagctggcgaaagggggatgtgctgcaaggcgattaagttgggtaacgccagggttttcccagtcacgacgttgtaaaacgacggccagtgaattcatatgtagcttacgacactgataacttcgtatatggtattatatacgaagttataagcttcaccatgattgaacaagatggattgcacgcaggttctccggccgcttgggtggagaggctattcggctatgactgggcacaacagacaatcggctgctctgatgccgccgtgttccggctgtcagcgcaggggcgcccggttctttttgtcaagaccgacctgtccggtgccctgaatgaactgcaggacgaggcagcgcggctatcgtggctggccacgacgggcgttccttgcgcagctgtgctcgacgttgtcactgaagcgggaagggactggctgctattgggcgaagtgccggggcaggatctcctgtcatctcaccttgctcctgccgagaaagtatccatcatggctgatgcaatgcggcggctgcatacgcttgatccggctacctgcccattcgaccaccaagcgaaacatcgcatcgagcgagcacgtactcggatggaagccggtcttgtcgatcaggatgatctggacgaagagcatcaggggctcgcgccagccgaactgttcgccaggctcaaggcgcgcatgcccgacggcgaggatctcgtcgtgacccatggcgatgcctgcttgccgaatatcatggtggaaaatggccgcttttctggattcatcgactgtggccggctgggtgtggcggaccgctatcaggacatagcgttggctacccgtgatattgctgaagagcttggcggcgaatgggctgaccgcttcctcgtgctttacggtatcgccgctcccgattcgcagcgcatcgccttctatcgccttcttgacgagttcttctgaactagtgcgggactctggggttcgaaatgaccgaccaagcgacgcccaacctgccatcacgagatttcgattccaccgccgccttctatgaaaggttgggcttcggaatcgttttccgggacgccggctggatgatcctccagcgcggggatctcatgctggagttcttcgcccaccccaacttgtttattgcagcttataatggttacaaataaagcaatagcatcacaaatttcacaaataaagcatttttttcactgcattctagttgtggtttgtccaaactcatcaatgtatcttatcatgtctgttataccgtcgatctctagctagagcttggcgtaatcatggtcatagctgtttcctgtgtgcccaccccaacttgtttattgcagcttataatggttacaaataaagcaatagcatcacaaatttcacaaataaagcatttttttcactgcattctagttgtggtttgtccaaactcatcaatgtatcttatcatgtctgataacttcgtataatgtatgctatacgaacggtactcgagagctcatgcggtaccgaggtgcagctgttggagtctgggggaggcttggtacagcctggggggtccctgagactctcctgtgcagcctctggattcacctttagcagttttgccctgaattgggtccgccaggctccagggaaggggctggagtgggtctcaactattactggtagtgctagtaacacatactacgcagactccgtgaagggccggttcaccatctccagagacaattccaagaacacgctgtatctgcaaatgaacagcctgagagccgaggacacggccgtatattactgtgcgaaaggggcacatagtcgcagcctaacttggttcggcccctggggccagggcaccctggtcaccgtctcctcagtgcctggtgactcttccgcaatcagtcctgggacagaaacctcagggacagcctttatgagttttgatcacatctaacagagaggatgggccagtgagctagagtgatagagcgtgcgtgtgcggaggtgcagctgttggagtctgggggaggcttggtacagcctggggggtccctgagactctcctgtgcagcctctggattcacctttagcaactatgccatgagctgggtccgccaggctccagggaaggggctggagtgggtctcaacttttagtaagactggtgatagaacattttatgcagactccgtgaagggccggttcaccatctccagagacaattccaagaacacgctgtatctgcaaatgaacagcctgagagccgaggacacggccgtatattactgtgcgaaaaatgggccctttggttgtggtggtgactgcgcagactttgactactggggccagggcaccctggtcaccgtctcctcagtgcctggtgactcttccgcaatcagtcctgggacagaaacctcagggacagcctttatgagttttgatcacatctaacagagaggatgggccaggaggtgcagctgttggagtctgggggaggcttggtacagcctggggggtccctgagactctcctgtgcagcctctggattcacctttagcaactttcccatgagctgggtccgccaggctccagggaaggggctggagtgggtctcagttattagtggtagtggtggaagcacactctacacagactccgtgaagggccggttcaccatctccagagacaattccaagaacacgctgtatctgcaaatgaacagcctgagagccgaggacacggccgtatattactgtgcgaaagatcaggacgatttttggagtgtttcaaattggttcgacccctggggccagggcaccctggtcaccgtctcctcagtgcctggtgactcttccgcaatcagtcctgggacagaaacctcagggacagcctttatgagttttgatcacatctaacagagaggatgggccagtatagacatctatgatacgctcactcatacgaggtgcagctgttggagtctgggggaggcttggtacagcctggggggtccctgagactctcctgtgcagcctctggattcacctttagcagctttgccatgacctgggtccgccaggctccagggaaggggctggagtgggtctcagctattagtggtagtgttggtagcacatactacgcagactccgtgcagggccggttcaccatctccagagacaattccaagaacacgctgtatctgcaaatgaacagcctgagagccgaggacacggccgtatattactgtgcgaaagacggtggggcctactacggaacggtcaactggggccagggcaccctggtcaccgtctcctcagtgcctggtgactcttccgcaatcagtcctgggacagaaacctcagggacagcctttatgagttttgatcacatctaacagagaggatgggccaggaggtgcagctgttggagtctgggggaggcttggtacagcctggggggtccctgagactctcctgtgcagcctctggattcacctttagcatctttgccgtgagctgggtccgccaggctccagggaaggggctggagtgggtctcagctattagtggtcatggtcttagcacatactacggagactccgtgaagggccggttcaccatctccagagacaattccaagaacacgctgtatctgcaaatgaacagcctgagagccgaggacacggccgtatattactgtgcgaaagccggaagtgctggtagcagctacccgttctactactacggtatggacgtctggggccagggcaccctggtcaccgtctcctcagtgcctggtgactcttccgcaatcagtcctgggacagaaacctcagggacagcctttatgagttttgatcacatctaacagagaggatgggccagtcatcgagtctcgagctctctcgcagacacgaggtgcagctgttggagtctgggggaggcttggtacagcctggggggtccctgagactctcctgtgcagcctctggattcacctttagcagctatgccatgatctgggtccgccaggctccagggaaggggctggagtgggtctcaggtattactgttagtggcggtagcacagactacgcagactccgtgaagggccggttcaccatctccagagacaattccaagaacacgctgtatctgcaaatgaacagcctgagagccgaggacacggccgtatattactgtgcgaaaggggggccccaacttatagcagcagctgggacttattatcactactacggtatggacgtctggggccagggcaccctggtcaccgtctcctcagtgcctggtgactcttccgcaatcagtcctgggacagaaacctcagggacagcctttatgagttttgatcacatctaacagagaggatgggccaggaggtgcagctgttggagtctgggggaggcttggtacagcctggggggtccctgagactctcctgtgcagcctctggattcacctttagcagctataccatgaactgggtccgccaggctccagggaaggggctggagtgggtctcatacattagtagtggtagtggtagcatatactacgcagactctgtgaagggccggttcaccatctccagagacaattccaagaacacgctgtatctgcaaatgaacagcctgagagccgaggacacggccgtatattactgtgcgaaacgaggtgatagtagtgcatacgcccttgactactggggccagggcaccctggtcaccgtctcctcagtgcctggtgactcttccgcaatcagtcctgggacagaaacctcagggacagcctttatgagttttgatcacatctaacagagaggatgggccagtctgtctcgctgagtgacgctgatgtgtacgaggtgcagctgttggagtctgggggaggcttggtacagcctggggggtccctgagactctcctgtgcagcctctggattcacctttagcagccatagcatgaactgggtccgccaggctccagggaaggggctggagtgggtctcatacattagaagtagtagtagtaccatatactacgcagactctgtgaagggtcggttcaccatctccagagacaattccaagaacacgctgtatctgcaaatgaacagcctgagagccgaggacacggccgtatattactgtgcgaaagtccccaattactatggttcatttcctcgagatggtatggacgtctggggccagggcaccctggtcaccgtctcctcagtgcctggtgactcttccgcaatcagtcctgggacagaaacctcagggacagcctttatgagttttgatcacatctaacagagaggatgggccagtgctatagactgctcgctacacgtgcagcggaggtgcagctgttggagtctgggggaggcttggtacagcctggggggtccctgagactctcctgtgcagcctctggattcacctttagcagctataacatgaactgggtccgccaggctccagggaaggggctggagtgggtctcatacgttagtagtgattctagtaccatatactacgcagactttgtggagggccggttcaccatctccagagacaattccaagaacacgctgtatctgcaaatgaacagcctgagagccgaggacacggccgtatattactgtgcgaaaggcctggcgttctgcgccagctgctatggatacttccagctctggggccagggcaccctggtcaccgtctcctcagtgcctggtgactcttccgcaatcagtcctgggacagaaacctcagggacagcctttatgagttttgatcacatctaacagagaggatgggccaggaggtgcagctgttggagtctgggggaggcttggtacagcctggggggtccctgagactctcctgtgcagcctctggattcacctttagcagcaactccatgagctgggtccgccaggctccagggaaggggctggagtgggtctcacttatttatagcagtggtggcacatactacgcagactccgtgaagggccggttcaccatctccagagacaattccaagaacacgctgtatctgcaaatgaacagcctgagagccgaggacacggccgtatattactgtgcgaaagcgtgggtgtatgatagtagtgtttttgactattggggccagggcaccctggtcaccgtctcctcagtgcctggtgactcttccgcaatcagtcctgggacagaaacctcagggacagcctttatgagttttgatcacatctaacagagaggatgggccagactcacagagagactcagcgagagagtgtggaggtgcagctgttggagtctgggggaggcttggtacagcctggggggtccctgagactctcctgtgcagcctctggattcacctttagctatgccataagctgggtccgccaggctccagggaaggggctggagtgggtctcaggtattagtggcggcggtggtagcacattctacgctgactccgtgcagggccggttcaccatctccagagacaattccaagaacacgctgtatctgcaaatgaacagcctgagagccgaggacacggccgtatattactgtgcgaaacccgagagagggatagtgggggctgcatttgactcctggggccagggcaccctggtcaccgtctcctcagtgcctggtgactcttccgcaatcagtcctgggacagaaacctcagggacagcctttatgagttttgatcacatctaacagagaggatgggccaggaggtgcagctgttggagtctgggggaggcttggtacagcctggggggtccctgagactctcctgtgcagcctctggattcacctttagcagccattggatgaggtgggtccgccaggctccagggaaggggctggagtgggtctcaaacataaagcaaggtggaagtgaagaatattatgtggactctgtgaagggccggttcaccatctccagagacaattccaagaacacgctgtatctgcaaatgaacagcctgagagccgaggacacggccgtatattactgtgcgaaaggaaattataaggcaggttgtgactactggggccagggcaccctggtcaccgtctcctcagtgcctggtgactcttccgcaatcagtcctgggacagaaacctcagggacagcctttatgagttttgatcacatctaacagagaggatgggccagagctatcgcgagtctgactgagtgagctcggaggtgcagctgttggagtctgggggaggcttggtacagcctggggggtccctgagactctcctgtgcagcctctggattcacctttagcacctatagcatgaactgggtccgccaggctccagggaaggggctggagtgggtctcatccattactagtagtggtagttacatatactgcgcagactcagtgaagggccggttcaccatctccagagacaattccaagaacacgctgtatctgcaaatgaacagcctgagagccgaggacacggccgtatattactgtgcgaaagatggctccggtatggacgtctggggccagggcaccctggtcaccgtctcctcagtgcctggtgactcttccgcaatcagtcctgggacagaaacctcagggacagcctttatgagttttgatcacatctaacagagaggatgggccaggaggtgcagctgttggagtctgggggaggcttggtacagcctggggggtccctgagactctcctgtgcagcctctggattcacctttagctcctatagcatgacctgggtccgccaggctccagggaaggggctggagtgggtctcaaacattagcagtagtagtaataccgcattctacgcagactccgtgaagggccggttcaccatctccagagacaattccaagaacacgctgtatctgcaaatgaacagcctgagagccgaggacacggccgtatattactgtgcgaaagatcgaaatggctacaatttctttgactactggggccagggcaccctggtcaccgtctcctcagtgcctggtgactcttccgcaatcagtcctgggacagaaacctcagggacagcctttatgagttttgatcacatctaacagagaggatgggccagatagctctcgatcacgtgcgatcgtagcaggaggtgcagctgttggagtctgggggaggcttggtacagcctggggggtccctgagactctcctgtgcagcctctggattcacctttagcggctttgccatgaactgggtccgccaggctccagggaaggggctggagtgggtctcaactattagtaatagtgctggtagcacatattacgcagactccgtgaagggccggttcaccatctccagagacaattccaagaacacgctgtatctgcaaatgaacagcctgagagccgaggacacggccgtatattactgtgcgaaatatggggaggatattgtcgttgtgccagctcgctacggtgtggacgtctggggccagggcaccctggtcaccgtctcctcagtgcctggtgactcttccgcaatcagtcctgggacagaaacctcagggacagcctttatgagttttgatcacatctaacagagaggatgggccaggctagcatgctggccaggatccatgcccatggccgcggatgcggcgcgccatcgatatgcgtcgacatttaaatgggccccccggtgatatccccgggtctagagcggccgctaccgttcgtatattctatcttatacgaagttatatcgaattcctgcagagatctagcttggcgtaatcatggtcatagctgtttcctgtgtgaaattgttatccgctcacaattccacacaacatacgagccggaagcataaagtgtaaagcctggggtgcctaatgagtgagctaactcacattaattgcgttgcgctcactgcccgctttccagtcgggaaacctgtcgtgccagctgcattaatgaatcggccaacgcgcggggagaggcggtttgcgtattgggcgctcttccgcttcctcgctcactgactcgctgcgctcggtcgttcggctgcggcgagcggtatcagctcactcaaaggcggtaatacggttatccacagaatcaggggataacgcaggaaagaacatgtgagcaaaaggccagcaaaaggccaggaaccgtaaaaaggccgcgttgctggcgtttttccataggctccgcccccctgacgagcatcacaaaaatcgacgctcaagtcagaggtggcgaaacccgacaggactataaagataccaggcgtttccccctggaagctccctcgtgcgctctcctgttccgaccctgccgcttaccggatacctgtccgcctttctcccttcgggaagcgtggcgctttctcatagctcacgctgtaggtatctcagttcggtgtaggtcgttcgctccaagctgggctgtgtgcacgaaccccccgttcagcccgaccgctgcgccttatccggtaactatcgtcttgagtccaacccggtaagacacgacttatcgccactggcagcagccactggtaacaggattagcagagcgaggtatgtaggcggtgctacagagttcttgaagtggtggcctaactacggctacactagaagaacagtatttggtatctgcgctctgctgaagccagttaccttcggaaaaagagttggtagctcttgatccggcaaacaaaccaccgctggtagcggtggtttttttgtttgcaagcagcagattacgcgcagaaaaaaaggatctcaagaagatcctttgatcttttctacggggtctgacgctcagtggaacgaaaactcacgttaagggattttggtcatgagattatcaaaaaggatcttcacctagatccttttaaattaaaaatgaagttttaaatcaatctaaagtatatatgagtaaacttggtctgacagttaccaatgcttaatcagtgaggcacctatctcagcgatctgtctatttcgttcatccatagttgcctgactccccgtcgtgtagataactacgatacgggagggcttaccatctggccccagtgctgcaatgataccgcgagacccacgctcaccggctccagatttatcagcaataaaccagccagccggaagggccgagcgcagaagtggtcctgcaactttatccgcctccatccagtctattaattgttgccgggaagctagagtaagtagttcgccagttaatagtttgcgcaacgttgttgccattgctacaggcatcgtggtgtcacgctcgtcgtttggtatggcttcattcagctccggttcccaacgatcaaggcgagttacatgatcccccatgttgtgcaaaaaagcggttagctccttcggtcctccgatcgttgtcagaagtaagttggccgcagtgttatcactcatggttatggcagcactgcataattctcttactgtcatgccatccgtaagatgcttttctgtgactggtgagtactcaaccaagtcattctgagaatagtgtatgcggcgaccgagttgctcttgcccggcgtcaatacgggataataccgcgccacatagcagaactttaaaagtgctcatcattggaaaacgttcttcggggcgaaaactctcaaggatcttaccgctgttgagatccagttcgatgtaacccactcgtgcacccaactgatcttcagcatcttttactttcaccagcgtttctgggtgagcaaaaacaggaaggcaaaatgccgcaaaaaagggaataagggcgacacggaaatgttgaatactcatactcttcctttttcaatattattgaagcatttatcagggttattgtctcatgagcggatacatatttgaatgtatttagaaaaataaacaaataggggttccgcgcacatttccccgaaaagtgccacctgacgtctaagaaaccattattatcatgacattaacctataaaaataggcgtatcacgaggccctttcgtc

SEQ ID NO: 182 - DNA, 11392 bp, Artificial Sequence
  Synthetic DNA
tcgcgcgtttcggtgatgacggtgaaaacctctgacacatgcagctcccggagacggtcacagcttgtctgtaagcggatgccgggagcagacaagcccgtcagggcgcgtcagcgggtgttggcgggtgtcggggctggcttaactatgcggcatcagagcagattgtactgagagtgcaccatatgcggtgtgaaataccgcacagatgcgtaaggagaaaataccgcatcaggcgccattcgccattcaggctgcgcaactgttgggaagggcgatcggtgcgggcctcttcgctattacgccagctggcgaaagggggatgtgctgcaaggcgattaagttgggtaacgccagggttttcccagtcacgacgttgtaaaacgacggccagtgaattcatatgtagcttacgacactgataacttcgtatatggtattatatacgaagttataagcttcaccatgattgaacaagatggattgcacgcaggttctccggccgcttgggtggagaggctattcggctatgactgggcacaacagacaatcggctgctctgatgccgccgtgttccggctgtcagcgcaggggcgcccggttctttttgtcaagaccgacctgtccggtgccctgaatgaactgcaggacgaggcagcgcggctatcgtggctggccacgacgggcgttccttgcgcagctgtgctcgacgttgtcactgaagcgggaagggactggctgctattgggcgaagtgccggggcaggatctcctgtcatctcaccttgctcctgccgagaaagtatccatcatggctgatgcaatgcggcggctgcatacgcttgatccggctacctgcccattcgaccaccaagcgaaacatcgcatcgagcgagcacgtactcggatggaagccggtcttgtcgatcaggatgatctggacgaagagcatcaggggctcgcgccagccgaactgttcgccaggctcaaggcgcgcatgcccgacggcgaggatctcgtcgtgacccatggcgatgcctgcttgccgaatatcatggtggaaaatggccgcttttctggattcatcgactgtggccggctgggtgtggcggaccgctatcaggacatagcgttggctacccgtgatattgctgaagagcttggcggcgaatgggctgaccgcttcctcgtgctttacggtatcgccgctcccgattcgcagcgcatcgccttctatcgccttcttgacgagttcttctgaactagtgcgggactctggggttcgaaatgaccgaccaagcgacgcccaacctgccatcacgagatttcgattccaccgccgccttctatgaaaggttgggcttcggaatcgttttccgggacgccggctggatgatcctccagcgcggggatctcatgctggagttcttcgcccaccccaacttgtttattgcagcttataatggttacaaataaagcaatagcatcacaaatttcacaaataaagcatttttttcactgcattctagttgtggtttgtccaaactcatcaatgtatcttatcatgtctgttataccgtcgatctctagctagagcttggcgtaatcatggtcatagctgtttcctgtgtgcccaccccaacttgtttattgcagcttataatggttacaaataaagcaatagcatcacaaatttcacaaataaagcatttttttcactgcattctagttgtggtttgtccaaactcatcaatgtatcttatcatgtctgataacttcgtataatgtatgctatacgaacggtactcgagagctcatgcggtaccgctagcatgctggccaggatccatgcccatggccgcggatgcggcgcgccatcgatatgcgtcgacatttaaatgggccccccggtgatatccccggggctagcctggcccatcctctctgttagatgtgatcaaaactcataaaggctgtccctgaggtttctgtcccaggactgattgcggaagagtcaccaggcactgaggagacggtgaccagggtgccctggccccagacgtccacaccgtagcgagctggcacaacgacaatatcctccccatatttcgcacagtaatatacggccgtgtcctcggctctcaggctgttcatttgcagatacagcgtgttcttggaattgtctctggagatggtgaaccggcccttcacggagtctgcgtaatatgtgctaccagcactattactaatagttgagacccactccagccccttccctggagcctggcggacccagttcatggcaaagccgctaaaggtgaatccagaggctgcacaggagagtctcagggaccccccaggctgtaccaagcctcccccagactccaacagctgcacctcctgctacgatcgcacgtgatcgagagctatctggcccatcctctctgttagatgtgatcaaaactcataaaggctgtccctgaggtttctgtcccaggactgattgcggaagagtcaccaggcactgaggagacggtgaccagggtgccctggccccagtagtcaaagaaattgtagccatttcgatctttcgcacagtaatatacggccgtgtcctcggctctcaggctgttcatttgcagatacagcgtgttcttggaattgtctctggagatggtgaaccggcccttcacggagtctgcgtagaatgcggtattactactactgctaatgtttgagacccactccagccccttccctggagcctggcggacccaggtcatgctataggagctaaaggtgaatccagaggctgcacaggagagtctcagggaccccccaggctgtaccaagcctcccccagactccaacagctgcacctcctggcccatcctctctgttagatgtgatcaaaactcataaaggctgtccctgaggtttctgtcccaggactgattgcggaagagtcaccaggcactgaggagacggtgaccagggtgccctggccccagacgtccataccggagccatctttcgcacagtaatatacggccgtgtcctcggctctcaggctgttcatttgcagatacagcgtgttcttggaattgtctctggagatggtgaaccggcccttcactgagtctgcgcagtatatgtaactaccactactagtaatggatgagacccactccagccccttccctggagcctggcggacccagttcatgctataggtgctaaaggtgaatccagaggctgcacaggagagtctcagggaccccccaggctgtaccaagcctcccccagactccaacagctgcacctccgagctcactcagtcagactcgcgatagctctggcccatcctctctgttagatgtgatcaaaactcataaaggctgtccctgaggtttctgtcccaggactgattgcggaagagtcaccaggcactgaggagacggtgaccagggtgccctggccccagtagtcacaacctgccttataatttcctttcgcacagtaatatacggccgtgtcctcggctctcaggctgttcatttgcagatacagcgtgttcttggaattgtctctggagatggtgaaccggcccttcacagagtccacataatattcttcacttccaccttgctttatgtttgagacccactccagccccttccctggagcctggcggacccacctcatccaatggctgctaaaggtgaatccagaggctgcacaggagagtctcagggaccccccaggctgtaccaagcctcccccagactccaacagctgcacctcctggcccatcctctctgttagatgtgatcaaaactcataaaggctgtccctgaggtttctgtcccaggactgattgcggaagagtcaccaggcactgaggagacggtgaccagggtgccctggccccaggagtcaaatgcagcccccactatccctctctcgggtttcgcacagtaatatacggccgtgtcctcggctctcaggctgttcatttgcagatacagcgtgttcttggaattgtctctggagatggtgaaccggccctgcacggagtcagcgtagaatgtgctaccaccgccgccactaatacctgagacccactccagccccttccctggagcctggcggacccagcttatggcatagctaaaggtgaatccagaggctgcacaggagagtctcagggaccccccaggctgtaccaagcctcccccagactccaacagctgcacctccacactctctcgctgagtctctctgtgagtctggcccatcctctctgttagatgtgatcaaaactcataaaggctgtccctgaggtttctgtcccaggactgattgcggaagagtcaccaggcactgaggagacggtgaccagggtgccctggccccaatagtcaaaaacactactatcatacacccacgctttcgcacagtaatatacggccgtgtcctcggctctcaggctgttcatttgcagatacagcgtgttcttggaattgtctctggagatggtgaaccggcccttcacggagtctgcgtagtatgtgccaccactgctataaataagtgagacccactccagccccttccctggagcctggcggacccagctcatggagttgctgctaaaggtgaatccagaggctgcacaggagagtctcagggaccccccaggctgtaccaagcctcccccagactccaacagctgcacctcctggcccatcctctctgttagatgtgatcaaaactcataaaggctgtccctgaggtttctgtcccaggactgattgcggaagagtcaccaggcactgaggagacggtgaccagggtgccctggccccagagctggaagtatccatagcagctggcgcagaacgccaggcctttcgcacagtaatatacggccgtgtcctcggctctcaggctgttcatttgcagatacagcgtgttcttggaattgtctctggagatggtgaaccggccctccacaaagtctgcgtagtatatggtactagaatcactactaacgtatgagacccactccagccccttccctggagcctggcggacccagttcatgttatagctgctaaaggtgaatccagaggctgcacaggagagtctcagggaccccccaggctgtaccaagcctcccccagactccaacagctgcacctccgctgcacgtgtagcgagcagtctatagcactggcccatcctctctgttagatgtgatcaaaactcataaaggctgtccctgaggtttctgtcccaggactgattgcggaagagtcaccaggcactgaggagacggtgaccagggtgccctggccccagacgtccataccatctcgaggaaatgaaccatagtaattggggactttcgcacagtaatatacggccgtgtcctcggctctcaggctgttcatttgcagatacagcgtgttcttggaattgtctctggagatggtgaaccgacccttcacagagtctgcgtagtatatggtactactactacttctaatgtatgagacccactccagccccttccctggagcctggcggacccagttcatgctatggctgctaaaggtgaatccagaggctgcacaggagagtctcagggaccccccaggctgtaccaagcctcccccagactccaacagctgcacctcgtacacatcagcgtcactcagcgagacagactggcccatcctctctgttagatgtgatcaaaactcataaaggctgtccctgaggtttctgtcccaggactgattgcggaagagtcaccaggcactgaggagacggtgaccagggtgccctggccccagtagtcaagggcgtatgcactactatcacctcgtttcgcacagtaatatacggccgtgtcctcggctctcaggctgttcatttgcagatacagcgtgttcttggaattgtctctggagatggtgaaccggcccttcacagagtctgcgtagtatatgctaccactaccactactaatgtatgagacccactccagccccttccctggagcctggcggacccagttcatggtatagctgctaaaggtgaatccagaggctgcacaggagagtctcagggaccccccaggctgtaccaagcctcccccagactccaacagctgcacctcctggcccatcctctctgttagatgtgatcaaaactcataaaggctgtccctgaggtttctgtcccaggactgattgcggaagagtcaccaggcactgaggagacggtgaccagggtgccctggccccagacgtccataccgtagtagtgataataagtcccagctgctgctataagttggggcccccctttcgcacagtaatatacggccgtgtcctcggctctcaggctgttcatttgcagatacagcgtgttcttggaattgtctctggagatggtgaaccggcccttcacggagtctgcgtagtctgtgctaccgccactaacagtaatacctgagacccactccagccccttccctggagcctggcggacccagatcatggcatagctgctaaaggtgaatccagaggctgcacaggagagtctcagggaccccccaggctgtaccaagcctcccccagactccaacagctgcacctcgtgtctgcgagagagctcgagactcgatgactggcccatcctctctgttagatgtgatcaaaactcataaaggctgtccctgaggtttctgtcccaggactgattgcggaagagtcaccaggcactgaggagacggtgaccagggtgccctggccccagacgtccataccgtagtagtagaacgggtagctgctaccagcacttccggctttcgcacagtaatatacggccgtgtcctcggctctcaggctgttcatttgcagatacagcgtgttcttggaattgtctctggagatggtgaaccggcccttcacggagtctccgtagtatgtgctaagaccatgaccactaatagctgagacccactccagccccttccctggagcctggcggacccagctcacggcaaagatgctaaaggtgaatccagaggctgcacaggagagtctcagggaccccccaggctgtaccaagcctcccccagactccaacagctgcacctcctggcccatcctctctgttagatgtgatcaaaactcataaaggctgtccctgaggtttctgtcccaggactgattgcggaagagtcaccaggcactgaggagacggtgaccagggtgccctggccccagttgaccgttccgtagtaggccccaccgtctttcgcacagtaatatacggccgtgtcctcggctctcaggctgttcatttgcagatacagcgtgttcttggaattgtctctggagatggtgaaccggccctgcacggagtctgcgtagtatgtgctaccaacactaccactaatagctgagacccactccagccccttccctggagcctggcggacccaggtcatggcaaagctgctaaaggtgaatccagaggctgcacaggagagtctcagggaccccccaggctgtaccaagcctcccccagactccaacagctgcacctcgtatgagtgagcgtatcatagatgtctatactggcccatcctctctgttagatgtgatcaaaactcataaaggctgtccctgaggtttctgtcccaggactgattgcggaagagtcaccaggcactgaggagacggtgaccagggtgccctggccccaggggtcgaaccaatttgaaacactccaaaaatcgtcctgatctttcgcacagtaatatacggccgtgtcctcggctctcaggctgttcatttgcagatacagcgtgttcttggaattgtctctggagatggtgaaccggcccttcacggagtctgtgtagagtgtgcttccaccactaccactaataactgagacccactccagccccttccctggagcctggcggacccagctcatgggaaagttgctaaaggtgaatccagaggctgcacaggagagtctcagggaccccccaggctgtaccaagcctcccccagactccaacagctgcacctcctggcccatcctctctgttagatgtgatcaaaactcataaaggctgtccctgaggtttctgtcccaggactgattgcggaagagtcaccaggcactgaggagacggtgaccagggtgccctggccccagtagtcaaagtctgcgcagtcaccaccacaaccaaagggcccatttttcgcacagtaatatacggccgtgtcctcggctctcaggctgttcatttgcagatacagcgtgttcttggaattgtctctggagatggtgaaccggcccttcacggagtctgcataaaatgttctatcaccagtcttactaaaagttgagacccactccagccccttccctggagcctggcggacccagctcatggcatagttgctaaaggtgaatccagaggctgcacaggagagtctcagggaccccccaggctgtaccaagcctcccccagactccaacagctgcacctccgcacacgcacgctctatcactctagctcactggcccatcctctctgttagatgtgatcaaaactcataaaggctgtccctgaggtttctgtcccaggactgattgcggaagagtcaccaggcactgaggagacggtgaccagggtgccctggccccaggggccgaaccaagttaggctgcgactatgtgcccctttcgcacagtaatatacggccgtgtcctcggctctcaggctgttcatttgcagatacagcgtgttcttggaattgtctctggagatggtgaaccggcccttcacggagtctgcgtagtatgtgttactagcactaccagtaatagttgagacccactccagccccttccctggagcctggcggacccaattcagggcaaaactgctaaaggtgaatccagaggctgcacaggagagtctcagggaccccccaggctgtaccaagcctcccccagactccaacagctgcacctcggtaccggatcctctagagcggccgctaccgttcgtatattctatcttatacgaagttatatcgaattcctgcagagatctagcttggcgtaatcatggtcatagctgtttcctgtgtgaaattgttatccgctcacaattccacacaacatacgagccggaagcataaagtgtaaagcctggggtgcctaatgagtgagctaactcacattaattgcgttgcgctcactgcccgctttccagtcgggaaacctgtcgtgccagctgcattaatgaatcggccaacgcgcggggagaggcggtttgcgtattgggcgctcttccgcttcctcgctcactgactcgctgcgctcggtcgttcggctgcggcgagcggtatcagctcactcaaaggcggtaatacggttatccacagaatcaggggataacgcaggaaagaacatgtgagcaaaaggccagcaaaaggccaggaaccgtaaaaaggccgcgttgctggcgtttttccataggctccgcccccctgacgagcatcacaaaaatcgacgctcaagtcagaggtggcgaaacccgacaggactataaagataccaggcgtttccccctggaagctccctcgtgcgctctcctgttccgaccctgccgcttaccggatacctgtccgcctttctcccttcgggaagcgtggcgctttctcatagctcacgctgtaggtatctcagttcggtgtaggtcgttcgctccaagctgggctgtgtgcacgaaccccccgttcagcccgaccgctgcgccttatccggtaactatcgtcttgagtccaacccggtaagacacgacttatcgccactggcagcagccactggtaacaggattagcagagcgaggtatgtaggcggtgctacagagttcttgaagtggtggcctaactacggctacactagaagaacagtatttggtatctgcgctctgctgaagccagttaccttcggaaaaagagttggtagctcttgatccggcaaacaaaccaccgctggtagcggtggtttttttgtttgcaagcagcagattacgcgcagaaaaaaaggatctcaagaagatcctttgatcttttctacggggtctgacgctcagtggaacgaaaactcacgttaagggattttggtcatgagattatcaaaaaggatcttcacctagatccttttaaattaaaaatgaagttttaaatcaatctaaagtatatatgagtaaacttggtctgacagttaccaatgcttaatcagtgaggcacctatctcagcgatctgtctatttcgttcatccatagttgcctgactccccgtcgtgtagataactacgatacgggagggcttaccatctggccccagtgctgcaatgataccgcgagacccacgctcaccggctccagatttatcagcaataaaccagccagccggaagggccgagcgcagaagtggtcctgcaactttatccgcctccatccagtctattaattgttgccgggaagctagagtaagtagttcgccagttaatagtttgcgcaacgttgttgccattgctacaggcatcgtggtgtcacgctcgtcgtttggtatggcttcattcagctccggttcccaacgatcaaggcgagttacatgatcccccatgttgtgcaaaaaagcggttagctccttcggtcctccgatcgttgtcagaagtaagttggccgcagtgttatcactcatggttatggcagcactgcataattctcttactgtcatgccatccgtaagatgcttttctgtgactggtgagtactcaaccaagtcattctgagaatagtgtatgcggcgaccgagttgctcttgcccggcgtcaatacgggataataccgcgccacatagcagaactttaaaagtgctcatcattggaaaacgttcttcggggcgaaaactctcaaggatcttaccgctgttgagatccagttcgatgtaacccactcgtgcacccaactgatcttcagcatcttttactttcaccagcgtttctgggtgagcaaaaacaggaaggcaaaatgccgcaaaaaagggaataagggcgacacggaaatgttgaatactcatactcttcctttttcaatattattgaagcatttatcagggttattgtctcatgagcggatacatatttgaatgtatttagaaaaataaacaaataggggttccgcgcacatttccccgaaaagtgccacctgacgtctaagaaaccattattatcatgacattaacctataaaaataggcgtatcacgaggccctttcgtc

SEQ ID NO: 183 - protein, 1251 aa, Homo sapiens
IIPVNHHHHHHEEENPDFWNREAAEALGAAKKLQPAQTAAKNLIIFLGDGMGVSTVTAARILKGQKKDKLGPEIPLAMDRFPYVALSKTYNVDKHVPDSGATATAYLCGVKGNFQTIGLSAAARFNQCNTTRGNEVISVMNRAKKAGKSVGVVTTTRVQHASPAGTYAHTVNRNWYSDADVPASARQEGCQDIATQLISNMDIDVILGGGRKYMFPMGTPDPEYPDDYSQGGTRLDGKNLVQEWLAKRQGARYVWNRTELMQASLDPSVTHLMGLFEPGDMKYEIHRDSTLDPSLMEMTEAALRLLSRNPRGFFLFVEGGRIDHGHHESRAYRALTETIMFDDAIERAGQLTSEEDTLSLVTADHSHVFSFGGYPLRGSSIFGLAPGKARDRKAYTVLLYGNGPGYVLKDGARPDVTESESGSPEYRQQSAVPLDEETHAGEDVAVFARGPQAHLVHGVQEQTFIAHVMAFAACLEPYTACDLAPPAGTTDAAHPGEFRANYQNGKNNVPRLKLSYKEMLESNNVITFNGLANSSSYHTFLLDEERSRLYVGAKDHIFSFDLVNIKDFQKIVWPVSYTRRDECKWAGKDILKECANFIKVLKAYNQTHLYACGTGAFHPICTYIEIGHHPEDNIFKLENSHFENGRGKSPYDPKLLTASLLIDGELYSGTAADFMGRDFAIFRTLGHHHPIRTEQHDSRWLNDPKFISAHLISESDNPEDDKVYFFFRENAIDGEHSGKATHARIGQICKNDFGGHRSLVNKWTTFLKARLICSVPGPNGIDTHFDELQDVFLMNFKDPKNPVVYGVFTTSSNIFKGSAVCMYSMSDVRRVFLGPYAHRDGPNYQWVPYQGRVPYPRPGTCPSKTFGGFDSTKDLPDDVITFARSHPAMYNPVFPMNNRPIVIKTDVNYQFTQIVVDRVDAEDGQYDVMFIGTDVGTVLKVVSIPKETWYDLEEVLLEEMTVFREPTAISAMELSTKQQQLYIGSTAGVAQLPLHRCDIYGKACAECCLARDPYCAWDGSACSRYFPTAKRRTRRQDIRNGDPLTHCSDLHHDNHHGHSPEERIIYGVENSSTFLECSPKSQRALVYWQFQRRNEERKEEIRVDDHIIRTDQGLLLRSLQQKDSGNYLCHAVEHGFIQTLLKVTLEVIDTEHLEELLHKDDDGDGSKTKEMSNSMTPSQKVWYRDFMQLINHPNLNTMDEFCEQVWKRDRKQRRQRPGHTPGNSNKWKHLQENKKGRNRRTHEFERAPRSV

1. A chicken B cell, in which in chicken antibody light chain gene locus is replaced by the DNA sequence derived from a human antibody light chain variable region and by the DNA sequence derived from a human antibody light chain constant region,
which in the chicken antibody heavy chain gene locus all or a part of the DNA sequence derived from a human antibody heavy chain variable region and of a human antibody heavy chain constant region are inserted, and in which the chicken antibody light chain pseudogene locus is replaced by 25 or more DNA sequences derived from human antibody light chain variable regions,
and in which the chicken antibody heavy chain pseudogene locus is inserted by 30 or more DNA sequences derived from human antibody heavy chain variable regions,
wherein the chicken B cell has the ability to express a human antibody on the cell surface and also to secrete the human antibody into the culture solution.

2. (canceled)

3. (canceled)

4. (canceled)

5. (canceled)

6. The chicken B cell according to claim 1, wherein the DNA sequence derived from the human antibody light chain variable region inserted into the antibody light chain gene locus is at a position upstream from the DNA sequence derived from the human antibody light chain constant region, and the DNA sequence derived from the human antibody heavy chain variable region inserted into the antibody heavy chain gene locus is at a position upstream from the DNA sequence derived from the human antibody heavy chain constant region.

7. (canceled)

8. The chicken B cell according to claim 1, wherein the human antibody heavy chain is a γ chain.

9. The chicken B cell according to claim 1, wherein the human antibody light chain is a γ chain or a κ chain.

10. (canceled)

11. The chicken B cell according to claim 1, which is a DT40 cell.

12. The chicken B cell according to claim 1, which has been subjected to a treatment of relaxing chromatin.

13. The chicken B cell according to claim 12, wherein the treatment of relaxing chromatin is reduction or deletion of the function of histone deacetylase in the chicken B cell.

14. The chicken B cell according to claim 13, wherein the method for reducing or deleting the function of histone deacetylase is reduction or deletion of the expression of a histone deacetylase gene in the chicken B cell.

15. The chicken B cell according to claim 14, wherein the histone deacetylase is HDAC2.

16. The chicken B cell according to claim 13, wherein the method for reducing or deleting the function of histone deacetylase is a treatment with an HDAC inhibitor.

17. An antibody-producing cell library consisting of the chicken B cells according to claim 1.

18. A method for producing a human antibody or a humanized antibody from the chicken B cell according to claim 1, comprising culturing said chicken B cell under culturing conditions suitable for the cell to produce a human antibody or a humanized antibody and obtaining said antibody.

19. Antibodies reacting with various antigens, wherein said antibodies have been produced by the cell library according to claim 17.

20. A kit for producing the chicken B cells according to claim 1.

21. (canceled)

22. The method of claim 18, wherein the antibody is comprised in a pharmaceutical product.
